United States Patent Application Publication US 2026/0191916 A1 - sequence listing, part 65

SEQ ID NO: 341 - DNA, 314267 bp, Flavonifractor plautii
  source 1..314267: mol_type = genomic DNA
gtcttttttaacgaagaaatctgccggaggatatttcttttccccagtctctcgcccgagccggccccctccgtggaccgatgccgggtccgtgagactccgcccatccccggcagctaaacccgatgcggacgaagcaatatgcagataatagccatataatatgcaaataatatgaaaaaatggaatagaggggagaaagacggaaaagatgccttgggatggaggcaagggcggcagattgtgaccttcgaagatggtcatgtggcaggtgcgtggggcggaggttggtaggtgtgggggtcggcagctgagcggagaagttggccgtatgggtcggaaagtcacaggttgtaggcttatgagttagagatagagcggaaatgttaggcggattggtcagcaactgggcggcgtccaccggaagcgggcccccatggggctcatccgcagtgttgtccccaggctccatcatccgcaccggcattcccaagcagactccaccgccgccggcgccaccggagtgcagaacagagccgcatcggcgcagaaacatggccggtgatatgccgatttgcgtcgaccttcatggccccactggggttggctggcctgtttctcattccataatacagcggtttccaccgtcgccggcatcatggcaaaaacagaaggggcgatgaggaaggatggattggctggaaatatcggatttggtggatggaaggcttggacggtggctgtgctgcgatggaaagcatggacagtggctatggtgcggcggagaggatagtcgggggattatgccatgaccggaggagcatggatggagactatgcggcaacggaaaggatagactgaggccgtgctgcggcgtgaaggatatgcggggactatgctacgaatacacggtttttaacgattgtgatacggtaactatatggttttgcgatggagcttggcggggttcaatgtggtttatgaccgaatgaggaaaggtaggtggtcatggggtgagggagtcggggcgttcggcaaagagaaaacagccaggaagctcccgaactttagttcggtgagagaatcagaaacaaatatcctggctgttgctgccaacgggcaggtggttgtgggctatgtgggcgaggacaaaaaagagcggggccaggaggaattctcccagtcccgctttggtgcgctatcaaattctttggatgccagagatggcggctcgatcaatgacgatgcggccattgccgagccggctgccgaagtcgttggacatcgcgcctccccggtcggagagaatcacctcgtagtcagtgagttcctccaggcggccgaagatgatattctggccgccccaaagcattagtttttcatcgaggtgggcgtcgtcccacatgactttctccgaaagccaccacatggccttcgaagaaggccacagggtgtcggaggccagagggaccaaggcagggcggaaaccgacaagcacagtccgactggacgacgaattgtaagtgtagtagcgggccgaatagtacccacggcgcgcacgagaagacgctgtccccgttgcggcctcctgtccccagaaaaacatatcttcccaatgccagagggagttgtcttctccaacggtatcgagggcggaatcccattcgttaggagcgtcttcttttgtccccacttggagcagtcttgccgtgaagctaaaaccgccgatggagacccctttgccgaacaccagactctgggcgtctaggtcatcccagctgacctcggtaaggatgcagcggtcggcgatcagcatgtcgttcaccaccacccaatggatttctttgccttgagcggtttcgccgatgctgatagcctggccggggttgtacttagagccgatttctgctgggcaaccatccagatagagactgcccattccaatgatgtttgccatatcatgtttcctccttctgttttgtttggactcccacgatgacgcttcgctccacgacgatacttccgtcattgagccggatgccgaagctgctatccagggcgccatccccgccggagaggactacctcatagtcgttgatctcctccaggcggccggatacgatgttctgcccaccccagatcctcagctgctcgccgatccggacttcgtccagatggaccatgtccattgggtccagaacagggcggaaaccaaggcgctcgtctcgaagctgagcatgacagaagccccatttgcgggccgaatcgcacccgcggttcgcccggtactgcgtttcttctgcgatgtcctggccccagaaatgggtgtttttccaatgccagatgctgtcgtcttcgccgactgcatccagggcgctgtcccactcgttcggctcgccctcttttgctccaaccaggagcaggcgaaggtcgtagtgaaacccgccgatggtgatttctttgccgaacaccaggcattggacgcataggttgttccaactaatatctcgaagaatgcagcggtcggcgatgaagataccattcaccgccacccagctgatctccttgccggggaccgtttcgccgatctcgatggaccaattggggcggctgagatagtcgtcttccacagagacagggttgccgcacaggtacaggctgccgagcctgatgatattggccatatgttcgatgcctccttctgtttttgctttctccaaattgttggctgaaacgatagtatgcgcgattgctggaactcattcagagacagcggagacagctggagagaggtgggcagggagtcttgtctaacaaagaaagctgccggggtttgtttcgtttgccggaggctctcgcctcagccggttccctcgttgggaaccgatgtggggtccgtgaggtcccattgttttgtactacagcccgcgccacggtccttgggcaaaaacaaaattcccagcctcttttcttcgttaaaaaagaccctgacagaaaccttccctaaacaacaaagcggcccctctgcccaaagtcccaggcaggggagccgtttgttcttgtctctgtctatattcgcattctttccaaaaaagcagggctggagctatgggggagtggggctctggcatagggaggatggaaaaagaaacagggcggcaaaatgccgccctgctgagagttttctgctggttgtcagccgttgcgttctgccaacgctcaatacctatgggaatcgttgggtcccccatatggaccgcgactttgctcccagtcgccgggcttggcgccctgatgacgccgtgagccatgggtggttaccctgtcccatatccagctcaactttttgcggtgccctcacaccgaaacctctcggtttgtgcaactggacttacccaactgcactatgatgatagcccaacgaaggggccattgtcaagggatttttggctgcggatcggatggcggcggggcaggagagagggggtccatcagtgccgggtccaacagcggcaggactgctgcagggatctcctttgctgggtcctggaaggtacatctcgtatatttatgttcgccgttctccctggcgaagatgaaatcgactacctctccgccgaggctattctcgataggcttgcctttcccccgtagtgactgtggcgaataaaagccgtccttttcgtacatcccaattgaaaattctaggttagaaagcccgattttgtaggtcaccgtttctgtctgcatatccaacaagataatgacatcctcggtggttagttccgggagcctaacgaggcattcgagctttttcattaccgctttgaacgggtactttggtgcaaaaaacagttggtcattgacgattttcccctgttttgccagcatgaaaaacttcttggaatacagtttggtccctatcccggttagatgtaggaagtcgcttgtacggaacataacttcgatatattggttgccaaatacatacaggaatatctgcgaggacaactgctccgaatagttcttcgccgcaagaacgatttgattcctcaccacatctttccgatccatctctttgtacatgaggccggcctccatccttacaaaaaaacggggtggcaaaattgccaccccgcagagggttatctgctggtcgccagccatgatgcctctcagcaccaaataccccgtggtatattaagtccccttcgtggactacaacttatctcccagttgccgggcgcggcacttctcagcgccaatagtcatggatgtttaccctgttccatgtccagttcgacttttgcggtgccctcacaccggggtccttacgggcccaaaatcattgtatgccagagccagaagttttatgcagaacacaaaaccggaggcagtggcttactacggcattataatacacccggcccggcatcattgtcaatagcttgcggacagttttcggcgtattttagtgttcctgaaatccagacaaagagaagaggtggttctatgtccatgtacgaaattttgtccctggttcttgctgctatcggtgatcttggcgttttctgttgggtttgttcttgggagttggcggcagtgatggctgggatcttcctgggagagccgggtcttttttaacgaagaaaatgtggtgagggttgtctttgtttgctgggagcaatcgtccgggccggttccctcacacagcttccctatgggaagctgcagcgggaacctatgccggggccgtgaggctgctcagccacgactacggcaatccacaacggcctcaacgaacacctgctcaccctcaatataatagatcactttgtaccattttgcaatgttcgccttgtggtacagattcggcgggagattagggtcatcgcagggcggatagagataggggtttgccctgagctgcttcaccagctcccggaattcctccaggagccgccgggcggccggcttgctgaccctggctataaaggcggcgtggacatcgagctgccgctgcagtcgggggttaaactggacgctgtacttaggcatctccggccgcctcctcgatggcccgctccatgctggccagcacctcatcggcggggacatatcccacgccctgctcccggtctacctttgcacgcagcagatcggcgtagagggactgctcggagcttagggacaacgacagcggcactgcccggtcgcggacgatttgctggaggaacatgttgatcgtgccggtcatgctcataccaagctgcgaaagaacctgctccgcctgagacttgagttccgagtcgatgcgaatgctcatactgatgcttgccatattatcacactccttatatttgtactgtatcatattgtatatgctatgtcaatacaaatgcaagaattggcggtcgcacggactcggcataggttcctgaagggaacctgctacagcgagtgccaccggaaaaggaaacaaaccactgccccttttctccgttaaaaaagactactactccccccagaggagtctagccatctcccccgggggtgttttttctgcgcttttggaagggaatcattttagcaaagaaacgctgcaagacattcttgcactgcctttagcacgaagctaaacttcaggttgtccacgaacccccatgttttgcgcagcgaatattgcaaactagcacaacatgttatatcatagaggatgaacagctgttcgtcctcgcaggcttaggctgctggagccagtgctaagcggcctacagaccgcaaataggctcccaacacagcttttatccggaaagctgccacatgacttcctttccagaaagttgccacatgaccttcttcgaaggtcacaaagagagtcggcttcggcgagcgccctggcaaaaggcaaatcccatgcgacttttctccgttaaaaagacccatccataaaatatatttcttggcaaatgcatataatattagtgaagaggcaaggaatccagttctccctagaacggagaacccaaatctataatatttaaggaggaacttcaacatgaaggcgacgaacaacaaaaagcgcatttccctgctgctggcagcggccatgctgatcagcatcttcgctggcatcttcgccaccaccagtaaaccgacctttcccgatgtccccgccgaccactgggcctatgcgtctgtaaatcgggcctcggaaaacggctggatcgcaggctacagcaacgggaaatttggcccggcggacaatgtgacctatggtcaattcgcacttatgctgggccggtccgttgacccctacctgatctccgcgtacggaggggatccctcgatggttgaatggtatgtaccctgcatggcagtgatgaggggcgacagcagctattgcgaaggaacccccatcattgattctgatattcatgagattgccaacgagccggtcaaccggtacaatatggcgcagattctcttcaatatcatgaccatatatgataaggtccccagctatgatgctgctgcggtacaggctggcattgccgactggaagatcattcccgacaactataaggatgcgctgatggctgtggtgagcgccggcatcatcagcggtgtggacgacaagggcactttcaatggcagcgccctgatgaaccgtggtcaagccgccgcggtactgtgccggatgtacgatgtattttccggagccgggacgaccacccctgcgactcctgatggaactgatacttccaccagcaccgagctgggtcagaaactgcccagcggagccactgcggcggcaggcgtgaagtccagcattggcaaggatgatgcgtatcctacctatgggccatctgatgtagtatctaacaatggatactattctggagcgaccgatgttgatatcggggatgccgagttggtctatgaactgctggatatggtgaatgcggctcgcgcagaggagggttctccggcgctcaagtggacgacttctgatcaggctgaagagtatactctgttgagagctcatgagctggcttcaaacttcagtcacgatagacccaacggaagctacaatatcttaggcgaagtctgtaccaacggccctacttcttccgttgcagcatataacaactggatgaattctgctgcgcataaagagattttgatggatcctggcaacgagtatatgatcgcagcaaggtctggaaataggtggattatttgccttgggattgatgggatggaccttaccctcaatggatatgcagtaaacaactatactcgctatacgatccagaattgataatcttcaagctgaaatatttacatgttagagtcaggcgatagcatgtacagacaattacaatggtgggatactgttcagcaatgtaagactttttgaaagtaaaatactattatggagcattccgccccggagagatcaatctctccggggattttttttgcgccaatgaaccaaatccactttgcatattataaaaatatgcaaggagctgactcccagcccattgccaaatgctgaatcttcaacacaccctgtttagaaaatacgattcagcgtaactgcatataatagtcatgaattgccaaggaggtggtgacaaatatggctgcacccaatgaaacacaggctttcctctcacacgagcaaaaattcggctgcggcagctgcagagccgcattcccttaaaggaggaatcaacttaacatgcagactacgagttttaccaaacgcatcatgacactgttccttgtgttcgtcatggtactggggctgctcccggtatcccagctggtagtacccgcgaatgccgccgacgccagatctggcccagacgatgtcgttaccattaacggcggggaaactgagttctttgactcttatacctcccctattttggggaaggtgatcccgagaaatctggtttttgaggcaaatgggcagctcaccggcggattttgcggtgatcacagcaaggaatacagctcgcgcgtaaagtacatcaatccgacccccatcagtgaaacaaaatatgcgttctgcatgccggtcattgcacagtatgcgtggaactggttctattcgatggaattggatgagcgctaccctggaacatccgcagcatataaggcgcagatcgccaaggaagaacgcggcagcgaaaacaactactggccgccggccagcagagctctaggcggatcggttccgcaggcggccgtatggctggccggagcaggcaagatcagcaacttgaccgatccggcaaaccagcgcatgcttgcggaggaacgcaaccgcacggccacactctcgatcaacaagggcgtcccgaccagccctgtagaagatgtgatcggctggatccagggagctgtagacaactatgcaaaaggggtctatggcgattgggatgtctacctctacgagccggacaccaacaagagttattatcagcccatggtcattatcatgcctggcgaaacgatccccaaagaaggctggatcaagatcaagaagactgatatgagtggcaaggctctgagtggtgcaacctttacaatctatacagatgctggccatcaaaatccggttggcagcttcaaaacggaagattctgagtggacttactatcttattcaaaatatgacatcctccacccagaccttccatctcaaagaaacctccgcccctcccggctatgtctccaacggcaaaggctactccgtgaccgtcagcgccaccaacaacgccaccaaggagaccgcagcggctgtcaacggcggcgcggccatcaagaacggcgagggtagtggaacgccctccggcgtggtcaacaaggtggaccaaaacggcaacggtatcggccctgctaccttccacttcaagaagctgacccccaacgccgtcgacatggacattgcttgcgacgaaaccggttcgctggaacttcagtggacggatccatccggtgagaactacatcgagcctggcgagtacacggtcactgagaagatcccgcctccgggttacgagaaagacaacaacgcacagaacctccgcctctggatcgaggaggacgatgagggtgttcctgttgccaaaagcagcgggcctatcactttcgtcaacgagcccaagcattctatcgttatccagaaggtggacaagagcggcaacggcctgcccggagccgtgttcgatatctacctcaatggcgccaagatcgacagcgctaccactggccctgatggtacctttaccttcgccggcaccgacggcaatgggctggagcccggcacctacgattttgtcgaagtccaggcgcccaatggctatctgcttccctactggaagtgccagagcatcaccattaggcagggccagacggatgtgctgatccacaccctgaccttcgtcaaccacgactaccccgaaatcgttattcagaaggtctctgccggcacggagcagcccctggctggcgccgtgttcgaggtcaagatcgatgagacgcccatcggtaccttcgggcctaccggtcctgatggaaccatcatcattgaccatgacacctacggcaagtacctcaacgagaaccaggagtcctggaccgtctccgtgcgtgagatccaagccccggacggctatctcatcgacgacactgactggaagtctgttgagttccaccgcggccaggaaatgctccccttcgtcttcaccgacaccgggtaccctgagatcgtcatccgcaagtcggaccgcgagacggaggaacggctggaaggcgctaccttcgatatcaagatcgacgccggcgccagcttcagcctgaccaagcagacggacgagaacggcgagatccacatcacctatgacgactacgagcgcttcatcggggatatcgtctgggaccgcggctggacggtcgccgtcaccgagacggtgatgcctgacaagtacaaccgggacccgcagccagagtcggacggcggagccgggttcacagtgaccaagcagctcctgcccggacagaccctgctggaattcgacttcaccgacacccactaccgcgacctgctggtcgtcaagtcggacgcctccaactcctggcggctggctgacgccaagttcaagctggagtccatcaacctggacgatccggccgccggcggcacggtcagccgtgagggcgccaccgacgccaacggcgagctgctgttcgaggacctgcccaacggcacctacaagctgacagagcttaccccgcccaccggatacgatatgccggacccccatgagtggacggtcaccgtcacctctatgagcgaccgggtcatccagatcgcggtggagaacgagccccgcgagggcctcaccatcaccaagcacgacgccatcaccggcaagccgctggctggagtggaattctccatccggtacctgggcgatggcaacgattccaccaataccagcaacgagccccgcacctataccactgattccaacggtatcatccatctgcctgacgcagtccccggctggtaccagatcatcgagacgcgggtcccggacggctatatcattgacagcgaaccccggctggtccagctggtgaacgcccatgatacagtcgttgtgaactaccacaactatcaggatacccagctgatcatcctcaaaaaggataaccagactggcctgcccctggcgggcgcccgcttcatggtgaccaccgccggcggcaacttcatcgccgacctggtcaccgggtccaccggctacgccaccctcaacggcctggagcctggctcctatgtggtcaaggaggtggaggccccggacgggcacatcatcgactctacgccccaggcctttgagctccgcgtcggacagacagaacccgtgttcctggtcttcggcaacgacggcaagacgactctgtacatccgcaaggaggacgcgcagacccgcctgcctgtggccggagccgtgttcaagctgagccgtgtgaacggcgaggtcatcaaagaccgcctggagacgggcatggacggcctggccagtatcggcgacctgctccccggcgactatgtggtcgaggagatcgaggccccgaagggctacctgctcagcgaaaaccccaagcagaatgtctccctgaaggccggcgaggttgcgacagtcctgttccggaacaataagccgggcggcgtcgccatcctcaagcaggacgccatgtccggcctgcccctggagggcgccaagttcacggtcacgcgcctggacggttctcccgtcggcaaggagccctactatgtgaccggcaaggatggctacatccgggtgccggatctggaggccggctactactatgtccaggagatcgaagccccggagggctacctgctggataacacccggcatcaggtgcgggtggagaacttcgaggtcacgctgctgcagctgaagaactacgagaagaccaccctggtggtggagaaggtggacgcccagagcaaggtgccgctggccggcgctgagtttggtctgtttgccatggacggcaagcagatcggcgataccttcatcaccggcgccaacggcaaggccaacctcaccggcatcgagcccggctggtacatcctgaaggagctcaaggcccccatcggctatgtgctcaacgaggaggagttccgggtcgagatcaaggagggccagcctaccaccatcacagtccccaacacccctgagagcggcatcacggtccgcaaggtggacgcgtccaccaagaacccgctggccggcgcacaatttgagctgcgggaccagaatgataagctgctcggcagctatcagactgaccccaccggttcgttcgtcaccgtgaatgttggccccggcacctactatctcatcgagaccaaggcgccggccggctacacgatcgccaacgagcgcactgaggtcaaggtggcggagggcgagaagcctgtcgtcatcatcgaaaaccacaaggacagctccatccagatcttgaagactgactcggtcagcggcaagtacctggagggcgctgagttcgaggtcagggagctgaacaccaaccgggtggtcggcgcctacaccacggaccaggcaggtatcgcctttacggagcctctgcccgctggcaactacattgtcaccgagatcaaggctccctgcggctatatcctggacgagacccaccaccatgtggaggtcaagcctgatacgcccagcatcctgcgcgtcaccaacaccgcccttactggcatcatgatcaccaaggtgtctacagtcgacgacgagcccctgatgggcgccaagttcgagatccggaccgccgagggccgtgtgctgggcgaagtcaccaccgacaccaccggtaccgccacctatccgatcgcaacccctggcgtgtactatgtcaaggaagtggagcagccggacggctatctgctggacgagacggtccaccgcgtcgaagtggtggagggccagctggccaccctggtggtggagaacgcgcctctggcttctctggtcatcttcaagggtgacgcggacactggccgcggcgttgccggggctgtgtttgaagtctaccacgcagacggagcattcatcggacgctacaccaccgacgcccagggcgaggccctgatccgtcccatcgagcctggacactatatcgtgcgcgaagtcgcggctccggatggctatgagctgcccaatgtgacggaaaagacgatcacggtcaaggcagggcaaatcaaccgggtcaccttcgaggacctggcttacggctccctgatcgtccgattggaggatgccgccgacggttcgccgctggctaacggccggttccagctgatcgcggcctccaccgggaccatgatcaaggagggcgtgaccgccaatgacggttccatccactgggggaatctgcccactggcgattacctcatcaagcagacctacgctccggacggctacaccatgaccacaactgagaaacgcgaaacggtcgtttccaacgagacccgcactgtcgtcttccagaatgtgacctccggtatcgtcatcgaaaagctggaccgggtcacctccgcgccgctgcccaacgcccggttccaggtcacccgggactcggacaacatcgtgatcggcgaatatgtcaccgatgaggacggccttgccctggtgggcggcctgactcccggcatgtacacagtggaggagctggcagcccccacgggctacgagatggacgctccctcccagctggttcatgtgaaagccagcgaatttgcccacgcgacctttaccgataccccctatgccggcattaccatcaatgccgttgaccaatccaataaacctctggctggtgcgacgattgagatctaccgtcagaacggtgagctgatcaacacctggaccaccgataacaccggcatcgtccagaccgacaagctgacctccggctactatgtcatcaaggtcatcaagagcccggacggctacactcccaatgtgaccgagaccactgtgcagatccagaatggcgtggcggtcaatgtccggctggtattcaacgccggcggcaccctgaacatctacggcgtggacgccgctgagaagggccttgccggtatgcgggtggaagtgaccaccattgaggggaccaaagtcgggacctacaccaccgatgccgcgggcatcatccgtgtgcccggcctggacgccggctggtatgtggtgacggtcaccagggccccggacggctatacgctctccgaggtcaaccagagccagaatgtggagatcaccagcgacggcaccgcccaggtccggttccagtttggcaagacctacggcgtccagatccggacctctgtgagccagacgggcgccatggtgcccggcgtggagtacaaggtcaccaagctggatggctccgtcgttggcgcctacacttccgacaaggctggcctggcctatgtggaccttgcgcccggctggtatgtcatcgagcagacccgcctgcccaagggctatgagaactacgccctgtgcgccaagcgcaatgtggaggtcaaggccgatcagcccaccatcgtggactttgtcctgacccagctctccggcatgcgcgtgaaggtggtcgacgggacctccggttctcctatctacggggtcaagctggtcctcaaggacggctccggcaagatcgtcgacgagtacaccaccaacaacgagggctgcattaccctgcgtggcgccctggtggatgggacctacacgctgaccatgatctcggtccccaacggctatacggtggacacagtccccaagactattgaggtgctcaacgggcagactgccgaggtcgtgtggaagctctacaaccaggcgggccagattcaggtgcatctgacctccacggcttataacgcgactttggacctggctgccggcagcaacctgcccggcgccgtgttcgagatctacgacccattctcctatgtggtgctggctaccatcgagactgactcctacggcgtcgccgcctcgcccggcctgcccatcggacgctacatcatccgcgagaagacgcccgctccttacttcggcctgtccggcaaggagactgaggtgtacatcaaaatcaacaatgatgtggtacgggtcgagtatcaggccgcgcccatgaacctgaaggtgacccacacggtggccggcaacgccaacgccagcgcagggtccttctccaagtacctgttcaaggcggccaacaatgactccggcgaccgcctggacaacttcttcctcaacatcacgatccccacggacgccgtccgcggcgggaccctgttcaccggcaagtggtcctctgatgttgcctacaacatcagctacaagaccaacatgaacgactaccggcccatggccaccggcctcagctcggccagctcctaccagtacgacctgtcctccctggccctggatgtccagagcggagaatatgtcaccgatgtgcggtttgagtttggcaccgtgcccgccggtttcaaggtgaccagcgcccctgtcttctacggctatgtgatgccggctgtgcccaatgggtacatcatcatgatgcgctccgagtgcggcggccagtacaacggctattggaagactgagtcggccctctgcaccaccaatgtggtgaacaacaacggcggcggaaagctgcccagcactctgcccaagaccgggtattaagtttcccggtttactgcaacaaccggaacctgcggctggggccccgcgaaggggccccggcatgaggccggacatgaaaaggagatatgttttctatgaaaatcgttgagtgtagagtcatccgccccaaggaccgtcgttctgtggtcctggcgaccgccgagctgctgttcgacaacggcatccgggtggtcaatatgcatctgctgaagccccgtgaaggggatgagggcagccagctgcggatgccggtcgtgcataccaagagtgggatgaacatgaaccccttcaacccctgtaacccggagttccgggctgtcatgcacaaggccgtggaggagacgctggccgaggccgtggaagcccaggtcaacgactacaccaaggtctttgagacggtggaggagttccgcatcccggcgttcagccggctgaagctgcacaagttccccgacaaccacatcccggtgaaggccatggtctctgtgaccgttgatggcgagctccggctcaaccggatcgccgtcatcaaggccaccgatcctcccgcctatgtcgtccagctgccgacttatgcgctgcagggcggcaagcggccggccaggtacttccggttccgggcggcgccttatgaggctctgtacaagctggtgaccgacgcctatttcaaggtggcggaggttcctgcggatgagcctgtgcaggacgccgaggaacccgcttaattgaagaacattagcccccaggctggctgtgatggtcagtctgggggttgctttttctttatgagagaggctgctgtttccaatggcagattggcgatggcaggggagaaggctgttccgccggcggggaggtttttccatgctgtttgggcacccgccgcaactggtttcctcgcggaaacctgcgcggggtctttttgtactacagcccacataggttttcttcgaaaacctacagctgtctctgctgttgcgggaagccacacggctttcaaagaaagccgtaggcaggtctcacggacccaaaataggctccggaagggggccggcccgcggcaaaaagcctctggcaagaaaaatccttgtgccagatttcttcgttagaaaagactcgttgtaccttgcacaaaacgaaacactcccatgatgggaacttcaaaatgttcggctgtgggttttctcatcgaatcgtcgcccacatagggttccgttgggaacctgcagaaaagtccctaacttcagctcggtgagaaaatcagaaacagaattattattgcaacgaatgcatagaattaaccagatttccaatttggagtcaaataaaaaatcaggaggcaatacatatggagaagaatattaacgcgctgctggggatgtgcttcgactgtgaaagcactgactgtgccctcaacaacaacggcgagtgccgtttcccgctggtgtacgagcgcatgcctgtcatcaccgaggacgatggctgcactgaaggcgtcatcgacctgtatgggaagtgaggtgtaggacatggagaagaaacatccttgcgatgcctgtccgcgtaccggcgactgttttgaatgcgcgctgtatccagaccacacagtcaacgagtgcgtgaactacgagtgtgcgcacgaatacgaaggcacctgtctgctcggcatctattccaggtgcggagcccacaaggcgtcctgacaacaggaaggagatatctatgatcgaagtcaaaatgtgtctcaataggttcgcccgccgctgcggctactttttcaatgcgggcctcactgagggctatgaggacaagccgaatgtcaacaatggctacaactgcagccatcctgactgcggcgatgaggacgaagggatcggctgctgccgggcggatacctgcccgctggcctatcctgccggggacgacgacgatggtgatgaccagatggtcgtcgagatcgccgatgaggactttgacccccggtatatgacccgggtggaggatgaagaggagtaatacaatgggaagaggaaatgtttgcacccatggtaagtacgaggggctgtacttcattgaccgcgattacatcgagatttatgtgaaggatgatcctgagacgggggcccgcgacattcggtttctgggcggtatgactgctgaggacctgtgcggtaaggagtggctgtacgacccggaagagagccaggcaaacctggcccgaatcctgggcgacttcatgtacgacatccacgcctggtatccgtccttcaagaagtgcgagccttcctactgggaagatggagcccgcatcatcatggagaaccgactttaccgtattgcagttgaggacaacgagtggtcgttggccgtgaagctgctccagaagggcgacggcgaactggagggcctccagcgtgggtggttcgacaagtacatgttcgccatccgcaagtctctgctgaagtatctgcccgacatcggcacctatacggggccgtggacctccgggaggatcaccaaggaagagtttgcgctggaagtaatcgaaaggagagagaagaaacatgcgtcctgacatcgaaatcgtcaatggctggtttgagcagatgctggacgaggccattcaggaaactgaggcggccatgtccaacgagcacatctgggagctggcctacgagggagatgaggtccccaatcctcactctcagaatctcgccaacctgaagcggtacaaggaactgctgcaggctgtaaagcgggactgtgtgatctgattatgctccgggcaaatggctaccctcgtatattccttcatggagtctgcggggtgttcgccctggccctgcacgaccgcctggggtatccgatttctgctctccactggcggaatgaggatcccggcgatctgtgggccgggctggagcatctcttctgcgttgcccctggtcgggggtatgtggatgttcgtggggcgaccggtgattttcaggtattctgtatggatttctcctcgcccaaggacttccggatcctggaggatttagatgccgctcagctcaggaccgacttggttcatgagatggggcaggacaacctggacacgctatataacgaggctattgatgagattgaagctcatctggagaactacaaggtataggaggaataaaatatgctgtttaaggattttgctcagaagctgggcttcggtgatgatattgccaatgtggcgagaggcaacaattcggagctgcctcgggtcggcaatgcggcccgaaaaatcgatattgctctccggtatgcggtgaacgacctgttcaacgacccggacgacaagaagaagctcttggacgcctgcggtctgacccggaaaccggaggacatctcctactacctggtcgactcagtcgtgatgacgccagccgaaaacgggcattttgtccgctggctggcccacatcggcgatcaggatgtgtctattgctgtcttcaagctgctgaccaaggaggtagacctctgcggcaagacgatcgccttcgtagagggcgccgagttcgagagcggcctggctgacgacatggcggacgctatggttgcagctctgaagctgcacgatgaaactggtcatgacctgttcgctcgttggtgctacggtaccgacgattggcgggcagctcacctgatctgtccggcctgcggcagtccgatcggagcctattccagcgataggtacatggtcgccggctgcgaccactgtgagtgggaacctacgaagaagtaccactacaagtccgagctggccagtgtggagaacatgatggcggagcgcaagaagcaccggaggtatcgtcaaaaggtggagaatcatgataagctggccgagaagatgatgactgagatcaacaccttcaccacggcggcgacccatgaaacccccaagagcgatgtcttcttccggtatcgccgtagcattgacgatgccatcagcacgctgcggaaggcagccgaccagatggcggccaagcagaagaaatgaggaggagaaagaacatggagaagaaatatatcgccgatgtctatgttggaatcgagactggcccccacggcacattcagtgctgtcgtgctcagcggcaacgagcccgacagcatgaacaacgccgtggaccagctggaggaagcccttggagtccatgaaggcgacgaggacgatggcttcgacttcgattggaacatcttccgttgccagatccctgactccctggtcgagcagatccggaaggacgctgtgaaggactacctgaaacaggtgatcccctaatacttgcaagagccgctgccttcgggcggcggctttcttttgccgtttttgggggatgaccggatcttttttaacgaagaaatgcagcgggaggattttctttgtcggtggctctcgctgcacaggttccttcggaacctatgttgggcatgcaggctaccactgctaaccccacgcaaaaactgcccgccctcccagaaattccaggaaggcgggctgcaatagttgtattcaacgatgtgcgatatcggcccaaggcagcttggaaacatctacgctctcatactgatccagcagttcggtgaggtattggaccttcgccttcataccgctgtcggcgcaggcacggcggaccatatcagtctgatgccacagatgcgcccaagtctcggcccagtcctcggccctgctggacatggcatatccggagatatagctggaagagcctgtgctcaagcccagccacttatcacaggttttgttccagccgttcaggatggcggcgctactcatcaccatgtggcccatctcgtggctgtagtattgggcgttgccggagccggtataatagatctggtccaccttctgcgcgtcgccggagctgtcgtacacatggactccatagcagctgatgccctcgaaagtgtaggggcagaggatgatctcggcctttcggctgccctttctgaccgccatctctttcaggaatccatccgggtacaggtcataggcggccttcatggtcttcagctctgccagcacatcctcgaaatactcggtgtagccggcaaagtcagcaacatcctcatattggatgagcccattggccttaggcgtccactcgggcagatagaagatttggatgccgatctcattctccagggcccggcaatagtcgtaggccacatcattggcatagcggatacgagccttgccggtgaagtcgacgccctgcaccggcttgctcgcctgctccatcagagcctcgaaatcgatcttcttccaccgctccgggtggtatagggaggacagcatggtgcagcagacggctctggacgccgtgccggaggggttgaagtcgccgttggcattcacgccgctgatgatgccattgctgtacatccagatgatccagtcctcatagggagagccggcgacagctgtagcatagtcgccgatcagcagggacgcttccatgtagccgctctgcggctcctcgccattgacctcaatcatgtacccggcataggccatccccagcagacaggccagctcatccctagttgcgggtttgctccactccccggcactgaggccgaacatgtccagcccgtcatagatggactgggcaatggtccggttgccccaaaaatcagggccattcacagcgtcgaccttcgccagatcctccgcggtgtagccctcccgagggaacatccccaaagccatcgtgtacgcctccaggcgggaaacgggggcgccggggcggaaggtgccgtcagtgaagccggacacggcgtccagctctgccatttcggtcacatagggatagaaccagtcccctggctggacatccgaaaaggtcgccggcttgctgggtgcggacgcaaatgcgccggcaaaaatggatagtgcgcaggtcacagccaatatgcgggagatggttggtcttcgtttgttcatacaaattccctccttgagtgtgttttataatatgttatatgcacttgccgaatttgatattttatattttattattttaagtatgggagggcaatggcttccaccaaatttctctctgattctctcataaagttcgggagcttcctgtaggctccctgtatggaacctatgtaggctacggttcagtgagcgactggctcacggaccaggcataggctccggaacggagccggcccgcggcgaaagaccttggcaaatgggggagatccccgagtatttctttgttagaaaagattctggacaaaccaaaatcgttttgcacaacaggcaaaattagccgccgtttgaaacaacaaaatagatttttttagttttgcatataatagaaatagaaaggagtcgatctcaaatgcagaaaaacagagcctcgccccgctggacatccgaagaggatgctattttgaagcgccattaccgctctaagggtcttgcctattgtgtgcagaggatccccaatcactcgcaggcggccatcatcgttcatgctggtcttctgggtctatccaagaagcggccgaagcccaggagtcaatggacgggagatgaggaggatgtcctcctgaaatattatgtggatggcggcaccgctgcctgcatggagttcctgcctggacgaaccaggaatgcggtcgcccaccgggccaggaagctgggccttcagaccaaggttggatggacagaggatgagcgcgatatcctccgtcaatactacccggaggaaggccgggaatgttccaagaggctccccgacaagtcggagggttctatctatgaccaggctgccaaattgggacttgttcaaaaatcggtggccccatggaccccaaaggaagacgccatcatccggcagaactataaaaatgtcggggagtgcaagaaacagctgccccaccgttctatcagcagtatcgcaaagcggatcagcacccttggactgagtaaaaagctcagggccagttccaaatcatggactaaagaagaagacgccatcctgcgggagtattatcccaaggagggcaatatggtcatcatgcggctgtctggccgttcccctcatgctgtttgggtccgcgccgataagctgggtttgacgggcagataccaagaaaattaagaaacagcccggagagtgtgttgtctccgggctgtttgttatttgttatatgtcaagtttcgctgggttcgatctcaggcggctcatcactggagcctgctgcggcgaccgaataggtcttaccattcatctctaggatactcgccgggctttccttcccaaggttgggctcggcagcgtcatcggcaaggacgaactcccatggagagagctgctgaacagctgagtaggggagagtcgtctcgccacggctgttgaggaagatgtaccgcgctttcatatcggcgccgtctgccaagatcgacttaacctcccattctgtggcatcatcggcaaacaggaagctctcctctccgcactcagtccagaggaccagggaggcgtccatgggtgtttcagtgtcctccaccaccgggccaagcacatggaacagggcggtgcctacattgaaggagcttccagcgcccacagtcagcagcatgttgccgatgctggtcttaaactcctcataggcgtcgctgccctcggctctggaggtgactaccagattctcgccgaactgctcccggagcgccgatacgccggtccaacgggattcttcgctgttggggacaacaatgaagttcagcttttccacatcaaacttacctagggcctcggcgacagtgcccacatcagcctcgctgcagccaccaagcaaagccgcctgcccggaggagacggcgatggcatagccctccggcagatagtgaacggtgagttcacttttttcatcgggcgagatgttgttctcatccatcttggggatctccacataactgtggtcgggcttgggagccggctccgggtcaccgattgtcggtttgggcccgcagccagccagcaacgaaagaaccatggtggagaggaggccccctccaattagtttgtttttcatgtttttgcaacctcctaaagttagatttgaagcagtgctttttcgaactccttgtagctgtaccgatagtttgcgttggagaataccagggtggcaaaatcggtgtctttgcgatactctggctgaacgcaggcacagtccagcatcttttgagccagcgtatagcggtctggaacaaaccgcatccgcttcacaatgttgaactcgacttcccggaaggggacattgagcttttcgccggccaacttgcaacacttttcgaacagggcgatgagggccagatagttgttctggatgtcctccttggaccagttcttctgaccggcgacctccttgcgcatatacgagcagactagaagggcccactgaaccttgtctccttggatatgctctctcttggacggagcaggggaggagtgattcttgcccttacggactctcttttgatacggattagtcatcggacgcacctccttctgattctctcgccgaactaaagttcgggagctacctggcgattttccctgtgtggctgttcctggatgttctgactactcccccacatagggcgctatatcgaatcttcctattgtttttgtcctgctgattatattatatgcaaattgtatgattcatattttatgataacggcagggaaggagtatgtcttttttaacgaagaaaatgacagagctgtctttgtttgctgaaggcggttgttcgggcggccccgtcgggagcctatgtttggtccgtgagagctccgctgtttggatcaacagacaaaaagaagggactctggcaaaatgccagagcctcgtctgataaaatataaaaaccgagaagtgcatataatataattagaaacttagaatagcccggagactgtttgcataatacaaagccataaaaccgatataggcgaaagcaaaaccattggaaactcaaattttgaaagggggaagggccgcctcttctgcaattgatgcaggaacgctggctgcccatatgattatgagcaagaaaatttcgacagaagataactttagtgagatgctgaagaataaagtacgcaacgacccaaaggctggtatctggatcgtgtcattcatcgcggggctgatcacattcccacttatgtttttctgcctctggtgggtcactggaaatatggtgccagagagtgagctggttgggcatctgattaagctggctgtggtatctggtgtggtatcctgcctggttattcccagtgtggccagctgcgcccgcgtggagaaaatgagcgcgtctgccgacccggatattgctgaccctgccgattctcaggttgtggagagttcttctgaaggaactcccccttccaggaagaaggcggagaagcagtccaacaaaaagccccgtctggctgagttgcgcgatcagatgaccaccgtcgacacggaggcggttggccaggtcaccacgacctttgatgacattgccggctatgcggagaccaagaagaatatggagttcatcgtccgctgcctgcgtaatcctgagcagctgagggctgtgggcggcaaggttcccaacggtatcctgctgtatggccctcccggcaccggcaaaacgctgatggcccgggctctggctggcacagccggtgtgaagtttttcgctgccaacgccagtgatttcgtcaacatctgggtgggccagggcgctaccaatgtccgcgctctctacgccgcggccaagaagaatgcgcccagcatcgtttttatcgatgagatcgacgccctcggaggcgcccgtaaccctggccagcaccaggagtaccggcagacgctcaacgccctgctggctgagatggacggtatggataaggacagcggcgtgctcacaatcgctgcgaccaatgtcctatcggagttggatccggctttgatccgccccggccgttttgaccggaagattgccattcctctgcccaactatgatgaccggctggccatcatccgcctgtatgcgaagaagcgcgccatgaccgaggatgtctccctagagatgatcgcccgtcagacggtcggcatgtccgggtcttccattaacaccctgttcaatgaggcgtccatccgggctgtcatggccgaccgttctgtgatcacccgtgaggatattgacatggccctgacccagatgatcaccaacggcgagatcagcaaaacggtcgacaaggatgagctggaaatggttgcctatcatgaggctggccacgccctgctgtcccggctggttgcccacgaccctgtgcagaaggtgaccatcatcggcaatacggcaggcgccctgggcatcaccatccatggcggcaatgagcagagcctgctgccccttgaaacgctgcgtggccgggccatcatgtgctatggcggccgggctgctgaggaaattgtcttcggcaaggagcatgtcagcactggcgcaagccaggacctgaaggatgcgtcccgctatatccgcgcttatattgagtgcggcgcaggcaagtccctgctcaatgagagctctttcgccggccagaacatgatccctgataccgaggaggccaaggagctttctgcccagttctacgaggaggccgtaaaggtcctggccgaaaaccggcacctcctggatcggattgccaaggcgctcctggagaaggagacgctcatggaagaggacttcgaggccctgttcgagtaagacaaaatcagcctccccatttggggaggctgatgccttttcgtgaactaccacacgactaaagtcgctggcttcgggagtcgggagggacgaatgtcccgaccagatccctctattttcctgtttaaccggtcttacaggacgattccgaccgtccatgccgtagtggtacaggctaaccccggtgttcctaccaggttttgtggatagctttctgttgtttgaatgaggggctatgctgtcataggcagcggtatcaacaagtaatagagcatgccaagcccctcctcccacatgaccttcttttcagaaggtcacaggatattttggctgcgttgggatcccgtaggatcacctctccgcagtgcggacaaacccacacaccggcgcgctcagttttcaaccaatatcaaggacggcaagccggtgcggattctggagccgaacccggccgtcgccaaagtcgacgattttcccggaaacgaccagcgctatgccacgccggcgcgtacaggcatattctctctgggccgctgccagcacatcttgcggatcccgcccattcttggcgcaggagccagtccagaggatagtctcactgccatcctgggcaaacatcatgtgtccgctcagatcgtacttctttgagaaaggagccatatcagggcagacaactgcgacacactcgccgggagccagttcttcggcacaaatctcggcaactgcttcagtcaggccctgcacctggacatctacatcgtctgctgtccggttgatcgtcttcagatgcggatccatgaagtcacagacaacttccatctggcgtctcgggctctcagccgtcagaatcgccgtcttcatgcctggactgtagaaagactccaatgtctcagagagtacggcggtgctagtatgtgagtccagcaccggccagccccagggcggcgtgtaaaggcagtccgctgaaagctgccggtcgaacaattcgcctccttcctggtatccgcgcacatggaatcgaatcggtcccttgtcgttcctggctgcatcttccagatattcctgggccaacgcaacggcacttgcaatcgcctccgaactcagcatattgttgcccccttattaacccaccgtgttggtaggaagtacatatgttttcatttaattataacacggaaccgtgcgtttccgcaatatgcgaaacagcaaaaattgtcgaaatgttttgcaaaagacgctggcaaaagaaaatatatcattttgccgcaaacttctatggaaaatgtgctggtttgctacaaaagtcgtttgggaaatatgcgaaatgagattgccgagatttgcatatcattgaaccagtacccaatttaaggcggaatctaaccaaaaggaggaaaacgatacatgtcggaatttattaaggaggtaaggggcgatctactcgcctacgacgcaaaagtccgctgtcatcaggtcaactgcaaaggcgtgatgggcgcaggcctggccaaacaggtgaaggagaagtatccggaggcctatgagcagtacaaggccatgtgtgaccagtttggcagttctctgttgggccatactcagtttgtgatctgccatgacgggaccgtcatggccaacctgtttgcgcaggatggccacggcactgatgctgtgcagacggtcatgggagccttggacgactgcctgtcccaggtggccaatttctgcttccggatcgatgccaagccggccttcccgaagctgatgggatgcggtctggctggcggcaactgggatgatgtcagcaagctgatcgcccagtatttcgatttcaagtcggctggctgcaccatcgtggaatatgcacccaacgaggctgctcctgctgaggagccgaaggtggctgcgccggcggccgaatctgagcccaagactgatgagccgggcactgaggctggcgagccggcccctgaggttgagccgaagccggccaagaagccccgtgcgtcgcggaagcccaaggaggaattcaagcccgactacttggtggacaacccggagtccaagctggctgaggtcactatctacacggatggttcctgcaggttcaatccgggcccgggcggctgggcggcggtcatgctggctcagaccaagaagggtctggccgagaagcgcgtctctggtggcaaggaggaatccaccaaccaagagatggagctgacggccgtgaaggaggctctgtctctgctgaagacgccctgcaggatcaccctgtattctgactccagctatgtcatcaacacgattgcaaaaggatggctggaaggttggaaacagaaaaactggaagaaaaggggcggtattgccaacctggagctgtggcaggaggttgaccatctgcttcagcagcacaagatcaactgcatctgggtcaagggccatgcggacactgcctacaacaacatctgcgatgagatggcccaggctgagtccgcgaagttcatctaatcggggtggctgccatgaagaggctgtctgcatacctatggctttcctcgaaagccatgtggcgagagggctttcaaacgctcctctcccgcctttactggcgggggaggagcctcaaagctcgcatccatagctggtatatccagaaagtctggatgccgcgacataaagaacctgaatttaccgaggcggaacgccaggaggccgcagaactgatagatgagattctgacagaattaaagatggaggagatacaacatgctggaaaatgaaatccgccatgcaacgatatgcgaagaggtcaaccgtgcctacaaacagggggctgggaaggagtttcatgagactttccacggcttccgggataggaatgatgccataaagatgtccaggagcctgctgggcctgaatctggatatgttcaagaagatgagcagaatccgtggcttcaaagcggcccgcggtgcgttggtcgcattggccaaccaggcgatgatgatcatcatcgagctggacagcaagcccatcgagaaagacaatcacggcgcactctgcaaagagctgcaggaactgtaccaccggaagaacctggattatggggatagcttccatctgtcctttcttgaggaaggactggcaatgccccgcattcggctcggcgacaagtacctgcgcttcaagacgctcatcggcggcgagaaacagcgcgtttcggacgagtcgatccgcgatacgctcatcgatttggccaactacagcatcatgacaattatggagctggaccaggcgatgagcactggcgctggtaagcgtgaggcttttctgcgggccgccgagcgcgtgagcagcgcgcctgtcacggtggttgatcccaaacaagaggaggaacagcttcagccatgggttgacggctgaattccaacaaaaagaccgggcagcagcaatgctgtccggttcttctttgggaagaggtgggattatgccggatgttaggcacaaaatatgttccagcacaactgcatataatataaaaaacgaacaaaataactggggtgatatatcaatatgactgttcttgcatcggtctggacaacagaccgtgacctggcggcaaaagccgctcatggagaccaggatgcttttgagcagatcgttttcgcaaaccaaaataaagtatattcgctttgcctgcggctggtaaacaaccgggatgacgcagcagatctggcccaggaggtattcctgaaggcctggcagtcgctgtctaatttccggggtgacagcagcctgtccacctggctgcaccggatggccaccaacctgtgtatcgaccatatgcgctacagccgcacccggcagcaattgaggggaccgtctttggacgatgaggagtcggacatccaggagccgggagactggagcctggacccgcatcataaactggagaaaacagagatcagccgcgctattgagcgaggcttatctgcgctgccggagcactaccggcagatcatcacgctgcgtgagatcgccgggctggactatcaggaattggcggccgccctggatattgacctgggcaccgtgaagtcgcgtctgtcccgggcccggctggcactccgaaagatattgctggcggatagcaacttttcggatcaaattccgtccaatcatgggaaaggaaaagggtgatctggaatgtctgtctgcagaaaatacgagcggatgatctccactgatattgatggggagctgtccccggaggaagagcgagagatgcagctccatctgaacagctgccgccggtgccggaccctgaagatcgagatggagcgcatgtgcgcctcgatgcgagtgatggatacaatcccagcaccgaaggacctggcgaagaagacaatgggccgggtacgggaggcgcccaaatccaaggtcatccatctgttccagaaaccctgggtaaggacggcagccggcatggctgcttgtgctgttttttgtgtttgcctatacggagcagcctcgcaggtaaacatgaaaggagcggccaacgacgacgcgtcgccgcaaaccatcatgtacagcggcagcatggaagactccagtcgaatgatcccggagatggctatggactctaccgctgtggcggtagttcggttcaagcagatgccggaggaatgggataaagtcccgttcgatgaagaccccactgacggcattgtagtgtcgcaggaaacggctcaaaaattcctgtcattgttggatgaacagggcatcgaatatgctctgagtggcgatgtggatgccgagaactggcattttgtgctggacgatgccaactaagaaacatcgcaaaacagctctccaaagaaatcttggagagctgttttttgtcatgcagtcggtgcgtatttctcctgaaattcaatcaagctgcagcccagatagcccaggatgaattttgatacaacattgatatccaagtccctgtctgtccgcttgcggactacattccagacatgttcgcccaggtcataacagacatccgccaggttggtcgtgcaatagatgcgctgaaccttacctttcttccagccgttgacccgcaggatccggcactgggcattcagctctgccatagtcatcgccggcatagattcctgtccggccagcatatccaggtttatgaccggctcaacaccgattgccaggacctcctcccgcatcttgcagaaggctgcggcggtccacttgcagtcgacgacggcacgatggtggccgatgataggggagccgtagaacctggtgatgaagtccaggttactggcttcagcctccgggtgcaggtgtttgaacagcttcatcgtgcagatgacctcattgttcagcctagtacccaacagcttatacttgttgcccaacatgcgccaatcgaaggccgcgttgtggaatacaatcgggcatctgtccacgaactggcggaacgccggcaggaccgtctcgattttaggggctcccgccacatcctcggtgtggataccggtgaggtcaacgattttctgcggaaccttcgcatggttcttcatgcggcagtaggtactgaaagactggatgaccttgtgtgtctccacatctattttgactgcaccaatctccagaatgtcgtcataggcgccaaagccagtcgtctcagtatctgccacaacgaagactgtgttgctggcaatgaccggcagcatgctctcggccgatttgatgggaaactcattcttaggagctccaatttttgtcgccataaatttgttcttgcctcctccctttgagattttcgttttcgcctgtattggggttccgttatattttatgcggttgcaccgttttttattttggaagcggcagggatgaggtggttgactggatattggaagatttgtttggggatacggccctagcgaagagagtcgtgtggcgagtcttttttaacgaagaaaagctgccagggtttgttttgtttgccgggagccatggcccgggccggtcccctcacgggaaccgatgtcgggtccgtgagacagcttgcctgttttgcacaactgcgggagagatctctgttttgtacaacagccaggagtgcgccgctatcggaaacatcgatcacgcggaaaaccggatcggctgtattctctgcaggctggctcacggaaggggaggaaggactgggcgtgggaccgttgatctggggccgtacggtacaggcgcagaggatgatggacatagccccagcaagggcaaataaacttttcttcatgttgggagacctcctttttgttattttgcctgtttagacgaatttttcggttggatagtcccctttaagcaggaacctcacggatcaagcatcggctccggtacggagccggccagcgtccatagcttccagcaaacaaaacaaaccctggcagcttttcttcgttaaaaaagactcgcacccctaattcccaacattcaaaatataaatttggtgtatcgcatataatataacagaacgattcgccaaccagcggtctggctgaaatacaaaaatgtacaagtgcatataatataattagaaaggcagttcttcccgccacagaagtagatttttgggaaatgcatataatatatgtgaacggcttttctctgggattctggtcgcccaatacggcgcaaataaatttcggaagaagtgcatataataatatcagaatgccatcaaagaatttcgaaggaggattgtttccatgaatctcaaagaggctttccgttatcagaacttcctggaccggctgttgaaccagactatggcaaccctgtccattcaggacaacctgctggaggtcagcaagctccaccgacggggcaaggccatcgccggtggcgaggacgagactgaggtggctgaggtccccgagctggtcgctcctgacgcagctatctctctggccctttccattgtgaaggagaaggaggccctgaccaaggccatcggcgtgtccaagggcaacctggccggcggggtcggcgacatggatgcggccattgagaccaacaagtgccgccagtcggtggccgagaaaatccgcagcgtgctccggatcaagagcggcaagagggtggagcggggcaccggctacactttcaacggtgagggcaatcaggttccctatatctacgatgtggaggtcaccaccatcgagaggttcgaccgcgccaagctgaaggccaccatgcaggatctactgtctgaggccgacaaggtctccgctcagatcgacgaggccgtggttaacaccaaggtcgattacactgccccctgggatgtgaatgcatccttcgaggatatcctttccaccttccaggggaaggacgaataaagcacagtgtccagcatgccgggaggctccggcctcccgggctgggcgggaataagccgagaacaagtgaatgtagctgagttggccaatctttgtcttatgtggtgtacgcggccccggtatgaccggcaattgtccggtctgcatgggaatgcgatgactatataatcaaatacttgagtttttgcttctaaaagcaaaaaagatgaaggcgccaatcaccagccgttgtgacaaacatcagccgccagtgcgcgatagcacaaatgcgtgagtccgcgagtcacctagatatgttgcacaggtttacgacattcgtttcgccacgcaatgcgaactatgtgccctaaggaccgcaagtccgttcaatatcttttgaaagatatttctaggattgtttaagatcctttactggaaaaacggattaggctgcttttgcaacatcatttcttcaacgcagacttcccacccagcccggaaggccggaaacccaaaatatattttggggctagtgcatataataatagtgaaaggacaaggtagaggccctttccatcaacttcaagtttactgcatcctttgtgcatttatgtatccccggatttcagatcgatgctgagtctgtcctctggggccccggtcgccggggatctccgtaactatcggcatctggaataacaaagtatggacctcgggtctggcgggaacgccggaagacagcagcgaggatcgggccgcagaggaggggcggctcacccccctaattagcattccacgatgagtatcgtttgtaatgtggcggccggtgagccgatgccgagctctccgggtttgcctccgcccttggggcgggcctttcaccaatcggcatctggaagaccaacttcgggagcccgggtccggaagagatgctggaagacagcagcgggtgtagacaggcagaggaggggcctggctcttcaaaacatattttatcagggggctgggctctccacccggcccccatcccctatgctggtgtagctcagttggcagagcgcggcattcgtaacgccgttgtcgccggttcgattccggccgccagctccatttttcaatttttcccccttgtggaggaggggtctctttatggttcagaacaatggcttggagttcgagtatatcgtccaggcttttttcgaagagcggggtgtttcgatattcgagacgcctggatccaacgactttggcgccgatctggtgctgtatcgcaacggcaaaattgccgtgattcaatgcaaatgccattcgtctccagtcggtatccacgccgtgcaggaagttgtcggcgcaattaagcactatggggctgatgccggcattgttatcagcaatcagccgttcacccgtcaggcggtcgccctggctcactccaatcatgtacttctgatcgatggctgtatgctgcaagcgatgatggatggagtttcggacgaaattctgttcgtggacgattttttggcagggctgcagaaagacagccctgtacagcaaccggtcgtctgtcaggtgcggcgggcgaaaaggccggtgcgggtgaaacttcggaaaatctaatcatgctggtgtagctcagttggtagagcatcagttttgtactctgagggtcgcgggttcgaaccctgtcaccagctccaaattttcaacgaggtgatcaatatgaggaaatgacattggccgtttgcgatattcccaaaagaaaggattgttttccctaatcaataacccaccgcctatagaggcgggggtttgccggaaggcagactctgattgattacccttggcggccctggtaagtctacggatactaccgggagcccgctccgttacccaggaatagataggcaccggcggatgtgatgcccaagtctgccgcactgcggcgcatggttaaatagccctgatgggtagggacagtgctatgcgtaaaaaccccgggataacattgggtaagggcaccctacaggcttcggcctgagcggctctcttggttatagccgctttttcagagaggaggggtcaaacaccatggtatatgtgcaaaatcatcttggtcagccgctgatgcctacacaggaccaccgtaaggtacggctcctgctcaaggccggcgccgccgttgtagtacggcggatgccatttacgatccggctgaccaccagaaccaagacctatgtccagccagtcatcctgggtgtggacaccggcagcaagacagttggtatgtctgcggctactcatgaagaagaagtattcgcagcggagctcacgccacgcaatgatgtggtgaaaaacttggctgaccgccggaagttccggagctcccgcaggggccggacaactcgctaccgccagccgcggtttaacaaccgggtccacagcaagcacaagggttggctggcgccatctgtggaggtcaagatccaggagcatatcaccagtatcaagcgggctttgagctcctgccaatcggtaaggtagttgttgagactgccgagtttgacctgcagctgctcaagtctatcgcagatggtatgcctgtgcctcagggcgaggactaccagaagggagagatgtacggcttctacaatgtgcgccagtatgttttcttccgcgatggttatacctgtcaatgttgtggtgctcatggtaagggtataaaattccacacccaccacttggagagccgtaagactggcggcaatgccccagatgacctggtgaccgtctgtgataaatgccacaaggcttttcatgcagggctgatcactgatgccaaactcaaaaagcgcaggcggaagtctaccagagatgcagcctttatggggatcatgcgcaagacattgctgcagcggttacgggcagaactgcccatcccggtcgttgagaccagagggtacatcaccaaagctacccgggagcggttgctgaagctgcccaagagccataccaatgacgccctggcaatcgctatgggcaggcatgggtttggcattgaggaagtgacttatatgccccagagcgaccgtatctaccagatcaagccggtgcgtcaccataaccggcagctgcacaaggcgctccccaagaagggcggtcgtcgccagcggagccaggggcccaagtatgtgcaagggttccggcgcttcgacaaggtgctgtaccgtggtcaggagtgcttcatctggggcttgcgcaccagagggtacttccagctcaaactgctcaacgggactaaagtccatgagtctgccaaagccagtgagctaattctactggagcacagctcagggtacttaattgcttgatttttaaggatattttaattacagaagggaggaatggggcgattcctctcccccctacagaggtaggagtaacctcgccccgattttgatgaacatgaagagaatcctgttggtgctgggtattggcgccggtgtaggcgctacctgctatttcgccaagaagaaactggatgagctgcaggaggaggataaaatgtactatgatatgtacgcggcccctccctatgtgcccggtccggctggctctgcgaagcagtctgcggcaaccgctgcgaaaagccctgttcctactgagcctgtcgctgaggaagagggtaccgagccccctgctgccgacaacgaaaacatgaaggatgctccttcagacgatccccaggaacctcgtgctcccgagcctgcggccggccccgaacctgagggcgatggtgctcccgccggagacggtgagaagggcgactccccccaaaagaaacctcccaggaccaagtcctaacgcgccgtgcccgccatccaaacagcctgggtggcgggcttcttttgccataaacaggaatatataggctttcgctggcttgcccttggtcctgcgggattcccttgttgtccacaacaatttgttcgaacagccatttccggcggaccctcacggacccggcatagggctccgaaacggagccggcccatgccatgcaatcaacaaaagaaaaaaatcctccgccacatttcttctttaataaagattgttccgccctaacctaagaatgagaactgaccatcctgcataatatccatacaacatcccaattctggagcggaaaatacatataggaggtaacaaaacaatgagcgagatcaaaaacgaatctttcagcatcggagatcggttccgcggtctggtgaatggagaaatccttgttgtggaagctctgcccaaaaagggcgatgagatccgctctccgggcggcggaagatggttcgagaagagcgacagcgtcgtcttcgtcagcgaaacggacggcaggcggtccaaggttggtctggaaatggccaaacggctgcagctggaaaggatcgggtgagagatatgagattcgtgaaacccaggaaaccgcggggaacgaagctcaacggggagaagtcctttaacttctgcaccggctgctattcgcccttctgcgaccccttccttcgcccgcccaatgttgaccgccggctccgtgccggcctgtgcccggcctgcggaaagcccaaggaccactgcggttgcaagtcctccctggatgcaaaacggccagtcatggtcacccataacaaccggaaggggaggcggagctgatgcgctggttgatccaatacattcgttcctgtttctgccggcatgattgggaactgatcttcaacacccaagtctcggttgacgacggcagttcctacagctgcaaggtctaccggtgccagaagtgcggctacagccgccgctacaagagccattaagaaaggagacataaacagatggagacaaagaaattccccattgaagttgggcaggaggtattcctgtgccccgctggcaactacacccgcatgggcatgaagccaaagctgggcgtcatcaccaagattgccaggaagtacttctatgtggacattcagtcagcctggggagagccgaaattcgaaatcgagaccttccagtatgccggcgatgactgcaactcctcatggatcctctatcccaatgaggagacctacctggaggagaagcgtcgccaggagaaactccaggccatccgggagtatttccggaactggtcccggaaggttcctgacaagatcatcgacggtgtgtacgagctgatcagagcggaggtggagacggatgcggattaagatcgatgacgattttggcatccactccggatttttcctgaacctcaagcctggctacacacctctggttggtcctaatggtgccggcaagacaacgctgcttcggcagctgcgcgagtacgccaatggccatggtatcatggtgttcgactactcgaaccttgtacacggcggcggaagcgccatggacaagtatctgtggagcggcaatatggagctgctggctatctcggccactagctctgaaggcgagcgaatcgccatgaactttggccaagctgtatcccgcctgggtgctgccgtgagggaggccaaacagcagaagaaagaactcttcatcctgctggatgccctggactccggctcgtccatcgaccggataagggagatccgcagccttttcgacttggtggcaaaggatgcaggagacaccgcctacatcatctgtgcatgcaactcctacgaactggtgaaggacgccgaggctgtgaatgtgcggaccggcaaaacggtcaggttcaaggactatggcgaatatgctgattttgtctgctcgttcatggaaaagttcgccccgcccaagcgggaggaagaaaccaagaaaggaggacggatgcggaagcgtggctgacacctccaatccaaacctaagatgatcaaaggtcgctatgtcgcgcaagtcactatcgattatgcgatcaaggaaaatatgcccggcctgctgccgtttgaaaagctgaaggatgttgtccagaaccagactactgatgccattaaggcaatgctggaggatgagatgggcgaggtcggaaagatcaccgttgaccaacagttcgccgacctctggcaaacggaggattgaccggcgccaaaaacttccgctccgtttggggcggaagttcttttttctctggaatagttttcagggcgtttgcataggataagacatccatcgatttaggagcaagaatcgacaggttaatacatatacaagtcggtctatgaaaccggcaaaggggatatctcatcgccacctcagatgactgctaccctggcagacctgagagatacatcaaaaaagtcgcggaagagctcaccgcgccgccttacaatgcagcgggcgcaaacgctgttggggatatattggagaaaagaaaagggctcgtgcgaaagcacgggctcttttctcatatcatgcgaaaatacgctcctcccaacctgcatataataaatgcaaggaggaattacaatatgacacacatgtctgctgaagaatacaggaacatcaattccaagaagaaaaaagtctccaagtaccgcagccggtatatctatgtctatgaggatgggctggcgtccgaacagaaggacttagtcggccacggagccatcgtacgcaaatacgacagcaagaaagaatacgcccggcacaaggagctggaactactggagcggggcggcgccatctctgatctgaaatggcaggtgcggctgctgcttcaggagggctttacagatggcgacggcaaaaaggtccggcctatctactacaacgccgatttcacctacacccaggatggcagggaagtggtggaggatgtgaaggggatcgaccggtacacgggcaagatccggacgactgaggcattccagctcaaatggaagctgctgagagccaagtatccgactaagtcgttccgcatcttctgatatcgttttatacaacagagggcggcggttcataaggcacaattcggtctgtgaccttctccgaaggtcatgtggaaaccacgcccctttaggggcggtttagcattaccccccccccgaggagtcgggggtatttttgtcggccaatgagttttacaatgcgtgcataggataacccatctctatatagagaggagggaaacctatgccgaccatcgcaatcactatgaaattgcaccttcgccccagcgaagaggatgcactggccttcaccgccatgtccaaagcatatatggaagcgtgcaactttgtctcccaatatgcgttcgacaacggcagttttctaagcacgacgaagctgcataaggcgctgtaccaggcgatccgcagccggtttgggctgaaggcgcaactggctgcttctgtattccggacagtcgttgcccgctacaaagcagtgcgggagcagctctggcagcgcccgttccgctacaaggatgagaacggcgaatggcagtctatcccccgaaatcttgactggctccagcatccagtgcagttccaccggccgcaggctgatctggtgcgaaaccgggactacagctttgcccagaagggaaccaggatctctgtcaacacactgggcaagcgggccatcatgtcttacgacaagcccgagtgcttcgccggcttcttcgatggcagctggtcctttggtactggcaagctggtgaatctcctgggtgagtggtatctccatatcccgatgacccgggaggtggacgatgctgcccaggctgaaataggcagttatacccatattgttggcatcgaccgcggcatcaggttcctctctgtcagctatgatgaaaagggcaaaactggttttgcctctggcagggagattatggccaagcgccaatcctttgcagatgtgcgggctgagctgcaatcgaaaggcaccaagtctgcaaagagggctctgaagcgcatttcgggacgagagaaccgttggatgagagatgttaatcatcgcctcacgaaggcacttgtctccgaatatggcgccggcaccctctttgtgatagaggacttgacgggcatcagcttcgcagagggcaaccagcgcgattcgaagggtaaccgggaactacactcgtggtcgttctatcagtacgagcagttcctcagctacaaagcgcagctggtcggagccgaagtgctgaaggtatcgcccaagtacacctcccagcgctgccccaagtgcggtcgcatcctcaagtcgaaccgccaccgcgagacccacgaatatgtttgcgatgcctgcggctaccgcaccaacgacgaccgggcaggcgccatgaacatccagtacctggggcagctgtatgcggcaggcgatccggagcccaagtttgcgctgcaggaacctgctccagcagccgtgattgccgccgaccctgggaaagctaaatcggcctagcaaaaggggccaagccggttcaagaaactaaatattcctgctgggtatatcctggcgggaccaaaaaacaggtgttgtcaaccacccggcgatgtagccataggtctgctgtaccgcagataccgcatgtaaaagcggcgctggggagcactccttcgggagcgacgccaggaccaagtcgatgagctacaagcctttgaaactatggagggttagggcccttagcaagccccataccctttatgggccggggcagttgactgtttgcacaaacagcgggctgccgctttttgctgccccaatgagcggcttgcgacggcgagacagcggaagtctcatggacccagcataggttcccgcgaaggaaccggcccgcggccaccacatgactttctccggagaaagtcacagcccctggaaaacaaaacaaccccggcagcgtttctccgtaaaaaaaagatgcttgcacagaatgattctgatggcccatgcataaaatccaaacatgaacccaattttggagaaaaaaatacaaggagaaattaaaacatgaatgctggactattagctgcgatggagacagaacaggcgcttgctaatctgctgtccgacctgaaggcccgcattgcgggggaggtcaacgatgcatccccgatggatggagttgagccgttcggcggcagcccacgctgtgcggtgctgagctccagggctctcatggggtcgctgcgtttcaatatgtcgccccgctactggctgcagggcgcccaggctgatgccgtagcttcggctgtggcctcctgcaagacggtgacggagctgatggaccgtctgaagggtatggtggaggcggagaaggtttcccatggcgaggacgccggaatagcgttgaatccgcatacgctcaccgtgattcaggagttcatctcctgacgcacaaaaaggaccggccttacgccggtccttttcatgtccaaattgttgttataaacgcaggagcctggggatttcccaggctcctttttggatatgattagttgccatcaagcacagcccggatcttggcgttggcctccatgatagccgctcgcagccgggctgcctccaggtcaaggggtgtcaactccatgaaccggtcgctgcagtcccgaaccgtctggtccagtttcagtagctcctcccgggccaattcgaggatgtccttcttcatggctcaaccctccttggtcccagggttatggcggcaggtgtcggtctcactgtcatagtcgcaggggccgctgccgctgtgccggcactcatcgcagagcatcagccgtttcccgcagtaggggcagaaagccttgaatccattgcagtccgtatcccagccatggatctcaacctctgcctcacagtgaggacaaatctcggtgacgatataggtacgctcgccaagctcagggtccagggtgaaacccttgtggcagaagccggtcaggtccgacagatagtcggagatggcgtcctcatcggtcagcccttccgggagctcgatttcggtaggcaaaccttccagatcctcaggatcgtccacatcccaaacgatattggtagccttcatgttgatttctcctttctcactttacataaacttccacgaggatgtaatcctctgggcgctcatggatatcccgcatctggccggggtccgggaatacagagaagtaggcatacccgcagccattctccagataggtgccccactcagagtagctatgccagctattgtccagggcgcgggcagccttctgcaggtcgtaggtgtccagcgtgtcttccttgagtccggcgggatccatgccaggggtatagaccttggacaggctgttcacaagtccgcgcttgatgtccggcagaatccggtctacctcggcgatcagcttgtccggatctttgaagcccaaggtgaactgatcgacatcgaagtcgctggtgtagagatagctctcagggtccgtggcgttgtcgtcaaacccggagctgaccgcatccaggatctgacggtacacagcctgggggacgatgccgtccttcaactgcttcaggtcctccttgtcgaacccaaacgcatctacatcaaatagtccctccaagtgcccattcttgacctcatacatcgaagagtcgttgatatcgatattaagggctttccagtttgtaacaatcagcattgtatttcctccttatattttagtctccagaatgggggtactggttaaatagtatgcgtactgcttgcaaacaattctggaagggagcggtagtggtacgagtcttttttaacgaagaaataagtcacagaaattcctgtttgctgatggctcttgtctcgggctggctccgttccggagcctatttcgggtccgtaaggcctgctgttttgcgctatcctgtctgtcgtttccgacgatatggcgggtcttttgttgtgtaaaacggagaattgacagcgatttttgcggtaaaatccatggtcttgggcagactacctccggcgtcattttctggtaaaaatagcggcaatcctatggcccgcaagggttgtccgctgtcaagaattgttctcactggctttgcataggatatcacaggccttcaatattggaggaattaaaaatatgccgtgtgcatactatcaagtcgtacattttgtatgatgtggaaacatcaaatacaagatgtagggcgggcagccatgcgcacggctggctgtactaatttttgaggaggtaaatctatgaaaatcaaaaagcgcaatggctccattgtggagttcaacaaggacaagattgcgtctgccatcgccaaggcattcaatgctgagactggcgccgccgacccgatcacggtgaattacctggccgagcaggtggtgaagaaggtcccggcccgcggcgcgacggtggagggtgtgcaggacctggtggttcggaccatccaggaggctggctactatgatgtggcgaccgcctacacggtgtaccgctacaagcgagagctggcccggaagtccaacaccaccgacgagtccatcctgtccctgctccggaacgagaacaaggaacttgcagaggagaattccaacaagagcacccgtatcgcctctacccagcgagactacatcgccggcgaggtaagccgggacctgacccggcgtatcctgttgcccgagaagatctccaaggcccacgatgagggcatcctgcacttccacgatgccgactattttatccagcccatattcaactgttgtctcatcaatatcggtgacatgctggacaatggcactgtgatgaatgacaagctcatcgagagccccaagagcttccaggttgcctgcacggtcacgacccagatcattgcctgtatcgcctcaaaccagtatggtggacagagcgttgacttggttcatttgggcaagtacctgcgcaagagccgggacaagtttgcccgccggattgcgagcgagtgcccggagctgagtactgatgaacaggagaaaattgtcaagatgcagcttcgtgaggagctgaaggccggtattcagactgtccaatatcagatcaacactctgatgacgactaacggtttttgaaaacaaattggccgttgtaaaattgcgtgaacccttgattccgaggggtgtcctggtgtaatccaccgccggggctaacggtagaagttaaataaggccgggtgcgtccagtcagcgcactactccaaacggcgcgaatacgcttcgtaagagacgctaaggtccagggaattccctggatagctgcaagataccgtgctgagctatctgctatatgtggacatgcaagttatgaaagccaatacatttatctccttttgcatatcaataaacatatttcatcagcaaaggagatcgcggaatgtacgggtacatttacatgaccacaaacaagatcacaggttcgctttatgtcggcaaacataaggcgccaaaatacgatcctcgttatttggggagcggagcctgtatttgtaaggagctggaacaatatggtccatcagctttttgcaacgagatgcttgctatcgcaaactccaaagatgagttaaatgaattagagaaggaatggattgcaaaaatccacagtgccttccctgacaaatgcgtcaatttcgcggtgggcggtgatggcggaaatgtctatgcatatgctccacccgaaatgatggaaaggttcatcaagacgatgactgaaattaaccgtcagcgttgctcctctcctgcgttcaaggctaatcaggccaagaatatgcagattcgttatcaggatgctgcggctcgggagcttcaatctaaagtagttcaggaggcatggtcagatgccgaacttagggagcagcagagtgagcgactgaagacctattattcatcgcacaagaaagatcagtcctacctccataaaccttgctccttttcgcttaacgggatggtgaagcattttgattcagtgaaggagcttcgggagtttttgaccagcgagtatggttatacgcctgatcgcagaaccttccataagctcatggaggatggagctatgggcatcccatataagccattccacaaaaacaaattcgcgcagcttgccggcatgcggatttgttatggcttcaattaaaagcagatagaaagtgtagaggccaggggtgatgagtgtagccccgtaggtgcggagatggatgccgtgcccaagcgcgcaactgaaatagaagagatggtcccctgcgtatggaaacatatgcgccaaagtgcaatcgcctttcgtgactctgctcctctatctgagggccgatgacccttacatcgaggaaaatgcgatgatcatcgaagaggttctccggcagcggctggagggcatcaagaatgaggctggtgtgtatatcacccccgccttccccaagctggtctatgtcctggatgagcataactgcctgaagggcgggaagtacgactacctgaccaagctggctgtcaagtgctctgccaagcggatgtatccggactatatttccgccaagaagatgcgggagaactaccaaggcaatgtcttcagccctatgggctgtaggtccttcctggctccatggaaggatgagaatggcaactacaaatttgaaggacggttcaaccagggtgttgtttccctcaatctgccccagattggcattcttgccgcgggcgatgaggagaagttctggtctctgctggacgagcgcctggagctttgcttcgaggctttgatgtgccggcacaacgctctgaagaaggtaacttccgactgcagtccgctgcactggcagtacggcgccatcgcccggttgggcaaaggggagtccattgagccgctactctatggtggctactcctccatctctctgggctacattggcctctatgagaccaccaagctcatgaagggcgtcagccacacagatcctgtgggcacggagtttgccatgcgggtgatgaagcggctgcggaaggcctgcgacgactggaaggccgagaccaacatcgggtttgccctctacggcaccccggctgagtctctctgctaccgattcgcccgcatcgaccgcgagcggttcggcgacatccctgatgtcaccgacaagggctactacacgaacagctaccatgtagatgttcgggagcacatcgatgcgttctccaagttgaccttcgagaaccagttccagcccatctccagcggcggctgcatctcctatgcggagatccccaatatgggtaagaacctggaggccctggaggaggtcgtgaagttcatttacgacaacatccagtacgccgagttcaacaccaagagcgactactgccacatctgcggtttcgatggcgagatcatcatcaatgatgacggcgagtgggaatgcccagtttgccacaataaggaccagcggaagatgaatgtcgtccgccgaacctgcggctacctgggcgagaagttctggaatgtgggcaagaccaaggagatcaaggcacgcgtcacccacctgtaaggagatcaacaaaccgaacaatggggccccgtaaggggccccatctataaggaggaagttatatatgtattatgctgacatcaaaaatgtggatgtggccaacgggcctggggtccgcgtgtccctgtttgtctccggttgtacccatcgctgcaaggattgcttcaatcctgagtcctgggacttcagctatggcaagcccttcgatgaggaggcgtccgccaagctgatggctcttctggagccctgctatgtgcgcggcctgtccctgctgggcggcgagccatttgccccggagaaccaggcggctgtcctagcctttgtccgtcaggtgcgggaggagttccccctgaaggatatctggtgctggaccgggtacctctatgaggacctggccgccggcaaggtcggcgagcacagccgcgagctgttgactcagctcgatgtcctggtggacggtcccttcatcctggagcagaaggacatcacccttcggttccgcggctccgccaaccagcgggtgctgaatgctcaggcatccatcaccgctggtgagcccgtgctcatgctcgggtactaaccgcaaaaactccctcgtccgttcacggatgggggagttcctttttatttggagaaagaggggagaagcatcttttttaccgaagaaatgtggtagggaatccttggctgccacaggccgttgccacagccggttccctccatgaacctatgttaggtccatgggatttcgttgtagttgcaaacaagcaggtctcacggacccggtataggctctgaaagagccggtgcaaacgatagaaattggcagggcaaaatgccccaccagcttttcttcgttagaaaagaagccgccgtacaggtaaaaagaaatgagggctcccacatgtggagccctcgttctttcatatgcagcgcgttgcaggaatagcaggcgacaatccaagaacttcgtccatgtactggtcagcagggaggagctttactctcccatacagtcctgcgttgcacaggtcgtcaatgcccttaccatcattgatgtcccaggtcatatataggacctcgtagccgtggttcatcagggccttacccagggacgccgatgctctggctacggccgaattgatagccgcatccgcatcaaaagcaatggtcaccggaccttttgccttcatgtgctcaagcattggcaggacatccttccagttacccacaccacggacattcagaaccatgtagccgcgcctagccagatgaagggccttaaatttaccctcagttactgcataccccttgaacctcttagatctcttcgaatagatgctcggaacaacatccacaagggtgttcagcttagtacccatggaacaccgctcaggctcccggtcacagatggagccagaggagaatccaatataccgggcgacattcttcacattcgggtcctggctctcaaattcatccttcactcgcatttctatcccattgatgagaccctcaggggagtggagcaggataccaagggcattctgcctggtgataaagctcacagcattttcctcctcatcccagtaaaagccaggcgtacccagcagccggtagtagagccggttttcacccttgtaggtgtcatggatcctaaggcgttcaacaaactcgacccagaacagctcgtcgccggcagctggcatccggaagaaatagttcgtgtccccaggggacagtccccgtttcttcatcagcatctgccgttccccaggggtgaggggggaggcctcggcgaacgacttgtagatcagatgctgctcctcagaggtgacagccccatggttggtgaatagggccttttcggaagattcctcttctttgacggacggcggcttaggaaccctgacctttcgccgggtccgcagggatccaggtaccggggaagagggctctgccaccacatcgttgcggtgggcatacatgtagtcgaccgcctccagaaagttccaaccgcgggacttcatcagaaggctgatgacaccctgaccgctctcgccgcaggcaaagcacttccatactccagtctttgggttgaagacaaagctgccaacagacttgtcgttgtggaatggacacagtgccagcagcccgtggacatccttgtaaaaacggatctctggaacagcgatggccagctgctgcggatacgggatcatgctcagatcctgcattttctgatatgagttcggcgttgttgtgtaacccatattttcgatacctcctattgtgaaatgtaatctccaaaattggccactaagtaattctatgcacgaatgcgaaaatccattattgcggctggaaggccagctggtgtataatggacaaacaaaaatctcaggagagctcctggtgcaactcagcaaaataaaagttttgttgagttcaagggagggacaactgcaaaattgaacaaaataaaatttttgttcaatccaggcttttggtcaacaaaataaagtttttgttgacctcagtggacgccaaatcggagatttcagggattttgggaggaatcatcatgtacatctggctggaccgcgcactggaatatttctcgtatttgccgcgaaacgaaccaaaactgcagctatggcatgattttctgctgtggtcggccagccaagtctgcgagccgctgaaccgcgacctgcagatccggattattgcccgctacggcggcgatattcggaccttgtttatgggcgcctaccgggctatcactgccggcgttgccgaagatccagcccagaatgtcctgctgcacctggctgtggaatttggcgttgcctgcccgtctccggcccaatatgccggcgagacgatcgatcagctctttgtgcagcgcgtcatggatctcaccgataagtccgacccggatgtggccctcgctgctgccgatggcatcaccatccacctggcaaactgcgacaaggactatggatcctccatgattgccatggcaaatgttgtccggaaccggttccgggacaactaccaggaaaaggcaatttttgtcagtggcggcgatggtaacgagtacagctatctggcgccatttatccagttggccattatgggaatgccctgctatgcttctccggatgggccgatcctctgcggagaccagcaggcgctgtttgctccgcaatcggcgttctgctctgcagagtttttttcctcatattggacaaaggtgcgcagagccgagctgtggcggatgaatcgaagaatgtagttctcggccaaacggaggaaatattctggcgctttttctttgttaaagaaagatttttacaaaaacttggcccccacccatcggtggaggccatttgtactgatcaaggattgcacgccttgcagggcgaatatccctgcgcaatcagctcatcccttgctccattaaactcctgccggttgcgttcgctgatatcagcggcattggcacagtcggggctgtggaacttcttggaattggtgttcaggacatagtctttcccaacagactccgcagccggctcccctgctccatccacgccaaccgtttcatccagccaggaatctccggtggcatagtcgatcgctacgccaggctgggcgttgtaggcaaagatattaaagcagatggcctcgccttcatcctccacactgtagccctccatctgaacgccggacgccactaggtcgttgctgtcatagatgggcgtcacgcggtacagaacatggttgttggtctcttggacatagtcggcaaccatattctcgaagggcagcatcccctggatgttcagatagcgggtgccggtgatgaggttgcgctcattggcattctccccagccagctggaagccaatcaggtgacagcggttgtacaaatatccgccgtccaccaacccgccgtagtccttgttcacccagccagagggcttgacctcgctgatcgactggcggggctcggtgggcatcagctcctggcagatgtttgcatacgccacgccgcagcggcccaattcatccagttccgcataggtctcgaacggctcggtcgtgatgtcatccgggccaaactccgggatatttttgttgagctcgatccagggggtgtccgcgtggaaaacaagctctcccagatactcctccacggcaggctcgactgccgggctgatgtccggctgcacgctggagccagtaaacatctcaacctgtcgccgcccctcatcaccggaacagccggtaatgcagaagatattcagaaggatgaatgccgctacagccaacgccgtaatgttccgaagtttcttttgcctcatttttgttttctcctttcggcgcgaatgcgccatttaattttcagcctcttgatttagctcccaaattggctgatgctgaatactatgccatttgccagagacccattccatcggcgcagaatgatgcccgggcagcctgcatatcattaggacagacttcaatcttggagcaaaaatctcaataggaggtaataccgctatggcgaagtataagatcggcatcacagaagctggcgacgccgggttggacctgtcctgggagccgtatgtggacaacctggacggcgtggttctggtaacgaaaaacatcacgcccagcttccatgatgcggctctgcgcaacagggagaaggcaatcctacacgccactatcactggctacggcaataccaagctggagccgcaggtaccggatcccagcaaggagatggcagctctggtgaagctggtagaggatggattccccaaggagcgagtggtcgtgcgcatcgacccgattatccccactgaccgcggcctggccagagctaaaaaggttttcgacaaggctctgaaggcagggttccgccggttccgggtgagtgtcatcgatatgtacccgcatgtccgagagcggttcgtgaaggctggactggtcctcccctacggacccaatggtttttcgcccagtactcaacagctggaggccgtggacaagatgttggaggagatttggtaccgggcgccgcagatccaaatcgaaagctgcgccgagcctgggttgaaggctcccgtcaagtgcggctgcatctccggctatgacctggagttgctgggcctgaatgaaccggatgcggacgcagacgggctgcagcggaagaactgcatgtgctattcgggtaaaactgaactgctgaagcacagaacccagtgcggacatggatgcctgtactgctactggcggtaaacaaaacaaaaggaggaaatagactatgtacacatcacaaatcatcacggctgaaatcaaatctcagaagggcttctttgtgggagacccatgctatgccctcacccgctccatgtatgagactttgtggggcaaaatgaataactacagggatggcgcctttacggaccctgcatccggcctggcctttgctgtggcgagcaccgccgagggcgacggctgctatcgtggcagcgacggctccaactttcctgtagactcgggcgctattgggatcatcctcctggagctggctgaccggaaacccggcaaaggctatggcaagttcatcaggacgcccggcacggccaagtttgtcgccgagaagggcgtattcgagattactggacctgacggcgaggttctcaccatcgatactacctgggattgatccctgcacaaatccccgctcagagaactctgagcggggatttcttttttttgttggtttctgcttgcggaatcttttatagtttagctggcggagaatattcctcgtccgcatcgtctttatcctgtataaggcagcctcacggacccggcataggctccggaacggagccagcccgcggccacagatccagacaaagcaaatctccccgccgctttcttcgctaaaaaagacgcctctccctgcctctgtccgaaatatgaaacgggtgaattgcatataatagtagtggaagaaaggggatggactatctatgttagagaaaattggcagtctatacataaatggagcgccagcgaaaactggcgccatgtatcagcccgggaataccatcagttttggggacaatatccccggcctggagctatattggaaacccatcgataagcacagctacatcctggctgcccctgccctactctgtatcagctggcgacagctgcggaaccttggttttgtgagcggcaagccattccagatggacgggcggatgttcatggtccgcctcccccgcctcggcgtcaagccgcctgctaaccggactgtgccagagggtatctctttctggggtgaggagatcttcattagttttgaaggtaagaaaccagagcagcggtcccctatcgctgggctcaataccaacagctgggacagcgcgcatccggcagaacagcgggaggacctgggattcgttccagtcctggatgagggtatttagtcctcatcggcatccgtcagctgactgacaatctcatcacccactgcgatataggtaaggtcgatcatggcctccttgagtgaaatgccgcattcctgcgccagtagtttcaaggagtccatgagctgtaccagtgattcatagtatcggtctgagagagcctgttcgtccacacattgatgccggcgtctgaaagacgcctgtgcttcgtgaaaaggaatgacattgcgacccatcaaaaaacgcccctttcgtttgaatttctgcttctattatatgcaaaatcaaattcagaaccttgccagcacaaatccgcacaaatccggcctatctgtgccagaaaggaggatcacatggaccgattcattttccataattcccagtataagattctggacacggtccgggatatgccttgggtaggtgtcccgctcccctttgcggagtgcattttctattttgccgatatgggcttgcaggtcagtactgctgtgtgcaaaaaccgtgcctgtttgtcgatggggtttgccatgctggtgaatggtgagccgactgggttcgcctcggtgaacgcggtattaaacaatggcagatggccaaggcagatagatttaagttttgtctccggtcgcggagcgccgcctgagagcatctacgagttcatccgcttttatcagcgactgagcatctatctggctcagccgaagcctaggcggcaggtctctgaaaaagaagtaaaagcaaaggaccctggcatggtcatcgacaggaaggatgaagagaagccgcaaaaagaccgtatcatcagccttgcgcctctctcggagcttgaactcaggcagtatgttccgggaaaggaatccctggtacacaaaaagcaggagcacccctgcgactatgcctattgggtgcgcggccacaaccgcatctaccgcaacggcctccagcgctggatagaaccgcacatgcggaacatcaagttcccggagaaatcaagaacctacactctgaaggaggaatcctgatatgaaaatcacgccaattactgactacaaggaattttaccggacaaaagacctgcccggctgcgataaagatatcttgctggctgaggtgaccgataaagggaacccggagatcctatcgttccttccggatgcagatcctgagcggatggttgtccaaagttctgagctatgcaaccatatcatctactacaatatgcgccagctcctcaaactgcctacactgggtatcatcgaccagaaacaaaaatactgttccatctataattctcccagcgtcatgcgaaatttttttaagggtggggccgtaaagatgatcacctaccggacggtggctgagactgttatcctctacgggctgactgcagaggagttgagaaccatctctcgctggtgctgtactttctccatggaagagaaaaactcccggccgcttgacttttgtgatctgaccagcttctacaataaaaaagccttgagccggctgatcggggagtatattgacccggcaacttccggtatcttccctcctcgcatcctaaaaggcatggaatatcctacctacgctgatttcctccatgtattccggtcggccggctacgacccttatgaggccctctgtattttcgcccatcggaaggtcagcagcctggaaaagctgggcgccgctggccccatgctcaatgcgtttgagctggaatacctggatgattcagccccctcccctgctcctcagccggccgcggagatcccgaaggccgagcggaagatcctggatgaatccgccgaggcgccgaagcccaagaataagccggctactaaggaaaaggacaatcccgcagaagtcgagctgcacaaggaaccggatgccgccgaacccccgctggcagctaaaaatgtcgagaatgcctttgcagagctgctgaacaaggctatcctgccgatgaccaagaagggtccctgccacttagtggaaaatatcagggccctgcgggaggggactcctggcgccgagaatgccgagctgttcgacgctctcctcctttcctccggctgctccaacctggatgttttcaactatctggcccggatcagtgtatcctacaaggttcccctctatgcgctgttttactaccagattattcccggcaggttcccgccccggaagaaattcactgctatcgagtacaagctgggcgaaatcgaaaaggtcgtaaaccgcgggatcaatgtaccgatgactgtcactgacggcaatctttttgaatgcatcgcggcccgctcggctacattcttcaacagtaaccggttcggagagccatggagtgacagcaatccggaactgatcgcactggtaaagaagaagaacatgacgcctcagatgcagctgatcctgaggactgaccgtcagaatgttgagcccgataggccagaagtcaaggatactgtgccggtcgaggagcccaaggatgcccccatcgttactgagcagactgcccctgttactgagagttccgataaacctgctgaaaaggagattgccatgactgtaaatttagttgtccgcatctgccgtccctgtgctgccgatgcgtgggaaaatgataaccccgataagaccaaacccggcttcttctgggacggcgccaccgaggaggagttgaaagccgcgcagcgctgcgtggacgagatgcttactgatgggcggttcagtttgccctccctcaaggaccggatgtcctgggttctgaagcaccccttcaaggcaaaggtgtctatctctgggaatggcatcagggccaacattgagatctcctgaggcgtgacatgaaaaatgccacccatgccagtatggtgggggtggctttttcttgtccttctaggaggcggatcttttttaacgaagaaatgggggcagggatattcgcctttgccggatggtgccgcaacgggctggttcccttacgggaacctatgccaggtccgtgaaacggccggactctggagcaatttgtttcgtgcaacggccaactatttgtcttcgttgacggttggacaggccgcaggcagagaatttgtgctttctggcaagaagagatttcccacaggcatttctccattagaaaagacgatctcgtgatgccacgattctttgctcatcatatatatgcaacatggactgcaatgccggtatagcccatttcctttccatttgcacaattatatgcaggttgcaagccctctattgtcggaggttccggacaaagaagaagggcccgggcaaaactgcccaggcccttcctgtcagacgccgacctcgtcgtccgaaagccaccccgactcctcttcttcctgcattttgagccggatgatacagatgctggtcttcagaattttggatacctccgattgggaggtcttgagcaccttggccgtctttgactgcggcaccttattcatcatttgccgcaccacaaactgctgtgtgttgttgagatgccttttcataatccgttcggcccgctcgtacaggatgttgcggtggatactctcgtccaggtcctccggctcatacaacgggtcatagctttgcagatctttgttgagtagattgtcccgctcgtcctcggggttgatactggcctcgatcgaaacagtgaccccgccgctccggctttttgcacggcccttgcgcaggtacatcttgacctcatttcggccacatgcgaaagcgtaggtagtgatcttattctgcgtcttcggattgtaggtgcggatcccctttaggaatccaatagctgcctcctggaacaggtcatcatagtcatccaacccacggtagggccgcaggatagcgtgaatgagccggctgttgcgctcaatgaactccgcgacttccgcgtcagtctgcgggatgtgcgcattgccgtattcgtcagcctgcatcagcatctggatctcctctggttcaatgtccccttccagcatatccagcatgtcttctcctcgccccagtacggggtcatccttgtccacaaatctcgccttggccataaaagagccctccttttaagatgcggcctttccactgcccgctaagggaaggcctgtgttgttgtatggagttaacttccgggttcgggcacttactgcgaaaatgcgcccagaagatgaaaaggcgaaaattccccttattatgtttattgggcggagaattattccatgctaattatatataactctaagtccagttgtctactcgcaaaccaccgaattttcgtacaactatcgtacatctgttcgattatattgcataaaaacagaaatcccgcctccaaaaaggaagcgggatttttgtgtaggttgcctaatcaggcggtctggataagtttcgtaaagagcttcgtaaactcatctgtgatgtcgataggatcgcaggaaatgaactgtccgtacatgtacaagaaattatccttcatctgctcccggtcactggcgcggccgaacatgattgggatgacaatgacgcctttgcggcgggcctcacggaccgcgtcgcggacatcgtccaggccggcccgggtgccgccattatagtcggaaggcaggccatcagagaggagaaccaggaccttcttagcttcacggcgggccagcaggtcagccgtggccacccggatcgagtagccatccttgttgcctccgccaatgccaactcccggctgggaattgtagcacttgctgccagtgctccgctcatcgaactttttgagggtcgcatggcggatctggctgccggagacatcgaacagcgagatcttcatggccgtgaacttggagagtccacgctcgatgatgccggccgcggtgcggctgagagtggatttgtccaggtagacatcacgcccattgaccttggtccgggcaccctggcctcccatggagccggagttgtccagcagcaggaaggtagccagatcggccttcatgggctgacccttgcgcatgaacacatgcgggtcgcgcatcccaacccggtagaggtctcgggcgcacacctgtcccacgcgcatattgcgtttctcggtccgcttgacgcggagcacgcgctccacatcattctccagcttgcggccggcgcgttccacatcggcaggcagtgccgtattagggatggtggggaacaactccagaaaactgcgggtgtactcaccagcatagcgctcggcgatcttctcccgggtaacctcctccttgttcttttccaccttatcttccttggcagcggcatccagctcgtccatgacgccctggcgcagagcctggagttcatcctcggtcagctcccggacatcatagtcctcggcgccgtcaccggagaaatcatccgtccagttttcagtgccagagcggttgctgggatcgcggggcatgcgcaaggcattgcggccagtgttgttggcaggagagccatccttgccgtccttgctatcttccttaccgtctttaccgtccttgccgtctcctttctccttgccgtcttttccctcatccttcttaccaggctttttgccggactttccaccttcggcctccttagctactcgctcagaaacagagccattgggcgagtcattgtactcgcactcgccgttggaggtatactcgtaaccaccggagccatcgccatcaccaggctggccttcgctgctgctgctgccgcctgccttccgctggtcagcttcagccttgagcagctcggcaaaatagtcggcagtactcttcaggaccttgacgcaaagttccttgcagtccttagagctgcgggcgtccacggccaggtcaaagtaaggcagcacagcctcatactccttttcgaacctggtgccggcgtagacggagatcccgtatggccgccgtccagtcttgacatagcagaggctggagttgacgaagtccaggaattcctcgccgggggtgctggccttctcgtccaaagtggacaggtcagcggtgccctgattcatcaggatcaaaggcatcttgtagccgggcagcttgtgaacgatgatgttctcgatccgcccatcctccatgatattcagcatgtccttggcaatcttgcccagcagctggtcagggatacccttcccggccatcatggaaatgtacttcttcatgatatccttgatatccttgaagttactgctgttgatgtgttgaacctcatgagccagaagggccttgaagatactcacccactcatagcgggtaaactcaggactgaagaaatagtcctccatgccaaccgtgatatacttcccgtccgtgaacgacgcatccccagtcgaaatctttagctggatgcggtcgctccggccatccgtgagaaaggcgactgtcttccgcatgaccgcctggaagctgctgttgttaatgaattcctgcagctcagcctgacgggccatgcgggcagagttcagctctaatgcccggagttctttatttttactcatacttgtttcctccttgaatatgtattctccaaagattggggtactgcttaatcatatgcaaatcgtcaaattcccattcaaaggcaaaaaagaaagaagcccccgaaggggcttctttggtggttaggccggatagacggcccggatgaagtcgcacacggtacggcgctcatcgggatcctggggccgacagcccacattgtccaacagtgcggcgcgcatgggcagccacttggccgcttccagcgcatcgataaacccgcgggtggtgagggcgtcgttagacagcttgccgtccttgatagccttgcggatcttctcatagatggtcgcgcaagtcttgacagcagccttgtcggcgccagggaccatgctggtgagcagcttcgccaggtccatctggtcctccagatagatggggacaaaacggtcggcggtggcgctgttcagcatgccagtgcccacatactcctcgttcattgtcgcccaaatacgggagtcagggtgaacggttacgaagccgtagccaggcacctcgatggagcgggcgtcatccgccagcgagtggagaatgatagcgatctcgggcttgacgctgttgatctcatccaggactacatctcctcccttcatcagcatctcgatgaaggagctcaactcaaagtgagtgccgtgatcgtccagggcctggccgcccaacaagtcgatcttgtccatgtcactgttgccctggatacgggtgagggccttgttcaagacccagcagacggtgtagacaagcgtgtttttgccggcacccttctcgcccaccaggcggatgttcttgccagccaggtgataacccagacagcgcgtcaggtagttgtcctccgcgttctgcaggaagagctgcttgggcttgatgacaacagcgccagtgtcgttgcacttcatggactgaagcaccccgtgaatgagagtgctgggcactccctgctccatcaggtaggtgacacgggccttgatgtctctggcctgcatgatgcccttcttgatgacctcctccatgtcagagaagaactcatccatggaactggactccagagccacggcaatctcatatgcgccgccagtcagaacattggttggttccacagggatggtacccttggcgttcagggccgcaatcagctcaggcggagcgtcctcgatcttaccggcaggactggcatcgcgggcagacatctcgccagcaacccaaacctggggctcgaagacgcccttttcgcccgtctcgaacattcgggcgaccagcttgccgcccttgaaggcattgatgtcttccaggacggagcggatcttcccatagcggacgcgggagccgccaaccttcaggatgagcggaccttcctcgctctccttgggcttatcctcccaaacgggaacccagtagagttcggcctcccaacgcatccgcttattgtcgtccccgtagggctgggcgttgagcagctttgcgtagcagccggcgacggaaggcttatccatgtttttggccacgaccgcattggaagaagttcccttgagaaccgtcttcttgggatcggccgccacatagcccaccagggcgccatccaggaaaacctggatggcgttgggatcggcggtgttggcaggctcacgcttgagctccaccatggtgccagtggataaggagttgatcgtctcctcggtggcctcaaagcctaccagaacggtaatcttcttcatgttcgtaatctcctttcagttcattaagctccaatagcgggcgccgcgctgcgggccgccagcatgctctccagcgccttctcatcaaagggacagatggacatgtccaggttgatgccggtggccctggcgtagttccaggcatccacgatagcttcctcgacctgccattcggccttgtccatatcatcgttggtaatggtggacagagacttggacagttgctccagcattgggttggcgaagacattcattttcttcacccgtgcggccgaacgcaccagcgtgttcagactacgggtattgaccttgccggtcttgccgtagtcggttgcaatggtgcaggccttggagaagatctcaccgagattgctttcgatagatctgacgatattagcggttacatcgtccttccaggtttggtcaaccaggtcctgcaggtcaggagccaggccggtagcagtgccaccggtagatgggaacgcgcggaccgtgacttccatctttgcccgtgcccggtattcctgggccgtagggatgccgctcgtgagctcacggagcagcttttcccggtcgcgcttcagcatggcccgcttgcccttggtctcgacgaccttctccacaccagccaaaaagttagcgcggatagtgtcccactgagcgaccacgagatcgatagtgcggaagtactcctcccgaacctcctcgaactcgctcttgaactcctcaaactcagccagcggcatgtagctgccattgagcgtgtgggagtacaggacgcggcgggcacgggtatcaagctgattcagccgggcctccagctccttgggaaccatgttcaagctacccgtggaaatgtggtccacatagaagctctgggctcccttgtcccacttctcggggcgaatgcccaacagcttgggcgggagattgaagcggccgcgggtccgaccgcagctgatcccgacgagaacgccgttctcggcggtgtagcgggccaaggagccgactcggatttcgatcccctttccgctgagaccctctaggagggttctcattttaacagtagatgtcgacattatgtattcctcctaatatgttttgattttctccgtatacggtgtcaacctccgaattggttggctatctcaatcgtatgcaaacggacctaaaacaattctgcaagggtggcgtttcgtgcgcattcctgcgccaaaggctggaaggagcaatctttttaacgaagaaatgtggccctgggatttcttccttgcctgaggtcattgccgaagcggctccattccggagcctatgccggggccgtgaggactccgcggcttccgccgttgcgtacaacggggtgatgtatcccatcgttgcgcaaaacaacggaattgcaaccggggggtctcagacttgggtcctgacttaggtgatgccacctagaccgtcgcccacataggttccctgcggggaacctacagggagctcccgaactttagttcggcgagaggaatggcgcctcggttctttagactaaccaaagaaaacgatgacctccccccctcgctgcgggggggcattgttccaaaatattaaaacgccaatgtgcaaataatatatgtagaagcacaaacttctgcgaaaggagggcatgtctgtgggcaagtccaaaaccccatcctacatagtggaaactccgctgctgacgaccaaggagacctaccagttcctggagcactgccggttcctgggctgccgggcaaaccgagtcatggtgaacgaggccaacaagcgcctcaacaaatactaccgcgacccggaggtcaaggctgtccgcaagcggcagcgaaagaagggctataagctctccccggcggagaaatccctcctcaaggacaagcgggaagagtacggactctccgactatgccttccaggcgtatctgaaggtccatggccggcggatcgccaactacctggacgccaatacggtacagaagatcgcaactcgggtctggcagggcgcttccgctgtcctgtttggcagaggccggaaggtgtactaccaggactacgagcatttcgtatccttggaaggcaaggacaacaagtgcgggatgctcttccggaatggctgcctgtcctggcagggctacaaggtcccgatccgggtgcgggccggcgacaggtggctgcagcgggcgctgcaggaccgggtgaaatactgccgggtcgtggcccgctggcacaacaaccattggcgctactacctgcagctggtgatggagggtgcagctccggctaagccccggaagccggctgtggacgccgatgtagggctggacctgggtccctcggccgtagccctggtctccaatgccgggcttagcctgcaggagctgggcgatgagatcaactccatcgaagctgagattgccaggctggaccgcaaactggaccgccagcggcgggccaacaacccacagaactacgacaagctcggccgcattaagaccctgaagaagggcgagcggcgggtgtggaacaactccagcgggtactatgagaccagaaaccgccgccgcgccctgtatgccaaacgcaaggccaagctgaagcagtcccatgagatgtttgccaacttcctgctggagaatgtgggcagctgcttcttcgtggagaagatgtccacggcgggtctctccaaacggtccaaaaagacgaagaccaacccaaagacggggcgtccgtacagcaaaaagaggttcggcaagagcattgccaaccacgccccatccatgtttgtagatatcctgacccgcaaggcccaggcggtgggcggcagcgtcgttaagatcgccgccaaggccatcaaggccagccagtacgaccatacggacggctcctacaccaaggcgccgctcagccgccggtggaagcggctcagcaacggcgattgggtccagcgggacctgtactcagccttcctgctgagctgtctgatggcagatggtcttgccatcgaccaggccaagtgcaaggcccggtacgacgccttcaagcgaatgcacgacgatatcattacaaagctgcgcctgcagaaggcaggcggcaagaagttccccaagtgtatgggtatctgatatccagttagctccctgcggcaagccggttgccggccccgcggggcagttataaacccttcgaagcaccttatagagggtggtagattcccgcccgagagctcttagagcaaggtctccctccggggagccgccctccttcgggaggggcgtggggttcgccccggggctcaaaagtccaacggtacttgcgctatagcttgttgcctctgtcccactgccgcaaggtcaaccctttggagggctcgccctcctcaggcatatgcaacatttgaagcgcccgtgtactgcccgagatcctgaatagtttacccggctccccttcggggaagccgggtgaggtaatctggcattggacagcacaaatacagcgttggaccctctccgcagctgaattagggatggggctaagttcggcacctcgccggacatagaacctcccgaactttagttcggtgagagaatcagtcaagtaacagacttgcatgccacacagggcttccggaggaagctaatgccgcagtgcccctggtaaagcaaaattcccccgccgcttttcttcgttagaaaagacttaaaataacctaaccccacaagcaaaaagagctgtcctgcaccaaattggtacagggcagctcttgagcaatcaagggtcaacgaactccagtttgaaggttttcacgccatcacgcatcccgggggcacccttcagtttccggactcctttgcccccattcttccaggtgaagttgaacgggccgactgttttgccagccacaaggtcctttacatccttgggggagatggaggccttgcaaaactccttaggaatcaggaagcggcacccgctgttcctgccggtacaggtgtagtagtccctctggaggaacacttgaccttttccacagcaggggcaggtgcataacccatctttgatgtcgatgttctcctcattgataggcttcggtttcttgttctccatggcgaacgccggaacgatctttccttccgcaatgaccagggcggcaacatattcgctgccatccttccgcttcagtttcttctccttggtctttttgccactgagcatcagcttcatctcagccacgctgattttggtgcccatgacctctgcgcgcttgacgatgaaggtacaggggtccttgtcagctttgtagtttacgcaccggtagtattccttgccgcagactacatcgtgaccgcagatcggacagggaccaagccgctcaaactgataggcgcggagattcgcgctgaccttttccagaatatcggctgtctcagccttgatgaactccagcatgtccgctttgaacttctccggatggccgttgtcctgcaggtctcgcagctttttctcccattttgccgtgatggcgggagaagtgatctcgcggtccttgatggtatcaataagcgccatgccaaaatcggtggggtaatagtggcccttctcgattcggcagaggttcgtcttatcagacgccagcttctccaggatgtccgaccgggtggcaggagtgccgatgccctcagcctcacgcagaatggcccgctgctccgcagaggagacaaacttacccgcgtttgccatggcgtccaggagcgacttgtccgtgtaccggtcaggcggcgttgtctggccctttcggatggacgacccggtaatatccacctggtcgcccttgctcagtggcggcaggatcacatccttcttttcattggtatacaggatggagaatccaggatccaccacggccttgccggaggcctttatcttccaaccattgctgtcgaccataacagtcgtagagtccaccgtataggccggcaggaaaatggacagcagtcgcttggccaccagcaggtagatcttcttctggtcctcggtcagcttggacgggtccaccttcttcaccgtaggaatcagggcatggtggtctgtcagcttggcgtcgtcgatgtagtcctttcctgaggtagcggctgtgatcgctgcaggcgttaccagcttcagcgccgcagtcagctcagggaaagcctccatgggcttgagtaggttcgggatctccggcaccatggatgtcggcaggaaccggcagctggtacgagggtacgagatgtacccagcttcatacaggtcctgggcgatcgagtctgtcttactggcgcggaacttgaagtacttgttcgcatccttctgcagttctgtggtagagtacagagttggcgccttggtagcagtcctcttggccacaacattctccaccgtaccagtcttacccagcccagccttggcgtcatttgccgccctctcattggggaaccgggtctgcttcagctccggcgggaccagtacaattccggggaacttctcccccttctgcatcgtcacgccaacctcatagaagttctgcggcacgaaatttcgaatctccagctcgcggtcgaccaccatcttcagcgtgggagtgaccacacgcccgatgttcgactttgcccggaccttcaacgacacggcgcgactgaaattcattccagtcagccagtcaaactgagcccggaatgcagccgcctcccgcagatgctgaaaaacagaggcgtccttcaggtcatgcagcgccttctggagatcagcctccagcgttgtagagcaccagaggcgctttaccggcagcttcagaccgttggcctcataaaaggaccagaaaatatgttctccctctcgctccgcgtcacacgcattcacgaggaaatcatatttcccggccttgatcttcgacatgatcttggccaccgacgccgcgtcatccggcagataccggaattggtccggaaccatcggcaggtatttttcttcccagggcccgccccattcgtcgcagtaatctcccggcatggccatcctcatcagatggccatgaaacgctgcaaaatccagcgtaaacgggaaagtaccgccgcttttgtaagcggattcgattgctctcatcagtgacggcttctcagccaacactaatccgcgcatattgtatcatcccctttgtcttcatatgcaaccataattgggagctgattctatactatgcaaattgccaaagggcaattcccggccgaaaggggctaagcacaatatagccggaactgctttggcggatatttgcagcatatgggcagacagtccggcgcgtcgcaaaatatcaaagagtagaagtgcatataatagtattagagtggggcgtgtagttttgccgcccgtgcatatcatcaggacatattttttaatgggcggggagtggtacatatgctgccgaatgtgcagactttcgatatacgggtcaagcgggtgaagttccacagggacgacactctccagactgtttttgatggggaggtcctggagtggcggccccgcaagaaagagtggacgccgacccgccaggtagttacctgctccggctattttttcaatctggtcgagaacgaccacatccatgtgaaggcagaggaggttgatcacgagctctatgggccgcagtggcaggtttatctgtccgagcgggtgacgccgggcactgaggctgagatgctcaaattcctgacatccatcaagggcatcgggcaggtcatcggccgccggctgatcgaggcttttggtctggatgtaatttcctccatcttgacagacgccacctgtctgaacacgctgggcctgccgcagccggcaaaggacgccttgtaccaggctatcgtggagaacaaatcctttgagaaattgctcatcttcctgcagggccacggcctgtcgcccaaatacgccacccagatctaccggatgtacgagtcccacgccgtggagaagatcaaggataatccctacgccctctatctggataaggtcatcgatttcccggcagcagcccggctggacgacagcctcggctactcctccccggagtcataccgcaaccaggcgttgctgctggcgatcctccgggaggactcggagggcaacggcaatctgtacaccgaggaggatgccctgccggggatggctgaggactatatcaggcgcaagctgtttggcacccgttttccaatgccgtccgccagcactttggaggacgctctccgggagctggcatccggaggggctgttatcacagactatatgcttggcgagggccggcctgtttatctataccgaaacttccaggctgaacgggccatcggagagcggctctttgagctgatggacagccctaaaaagctctgggcatccaaaaccgatattctttcggccatcacatgggcacagggctcgttccggctgacagccgagcagaaaggggccatacattcgacatttgtttcacctgtctcagtcctcacaggtggcccgggcaccggtaagacccagacgctgcaggtgctggtgcaagcagctaagaaactatggccaggcgtgaacattcgtatctgcgcccccaccggcaaagcggctatgcgggcgcaggagctgaccggggccaaggcctcgaccatccaccgggccttgggctacccgcacaataatctccggcaggatgagctggtttgcgacctcctgattgccgatgagtattcgatgtgcgacgccgacctctgttcctggttgcttagggccctcaactccagcgcccggctgctcattgtaggagaccacgagcagctgcccagcgtagggcctgggctggtgctccgggatatgatccagtcggagatggtgcccgtcaaccgtctgacccaggtgttcagacagggtggcggcagtttgatcgtccaaaatgcccatgcgattatcaagagcaggccgggtgcggccccggaggagttgagctggtcggccggcaagggtgggtccttctatttcatacaggcgaatgaccactataaaatccagcggatgatggtcaaggctgtgaagcggatgctggacgagggcttttccttggaccagatcgccgttctctcccctatccacggctcgccggtgggaactgatgccatgaacgccattctccaggaggagctgaacccgcgggcgctcggtattggctgtatggcctatcagtcggaccggtgcggagaactgagaccccgcgataaggtcatccagatgcgcaatgattatgaccttgaggttttcaatggagagacgggggtcgtcaagaaagtggactactctcccgtcaaggccgtattggtcgagttcccgggtccccgggaggtctggtattcggcccagcaggtcgaagaattggatctggcctactcgatcaccgctcatcgctcccagggcagcgaatttgatgctgttgtcattccaatttgcaagaccctgttgtataatacagacaaaaatgtcatgtacactgccattaccagggccaagaaacgggtagtccttgtgggcgacagggaatccctggatatcagcctggctcaggcaggctccatggaccggaattcgcatctggcgctccggatccaggaagagtttttggctacctgaaaaatcgaaaggagaaagaactatgagtacgaattatcattttgttaaccgcgagaagaagacccaggtggagcagctgaagaagctgctggagacagagcgggaaggtctgctccagcgcctggagaagttcggcgaggagaacccgctggctatgggcaacatcgaggatgtcatctttgccctccgtccggccatgaccagcgccaatgtacagagttgggacgacgacatggagatcggtgtcgcctccagcaccaagttctactgggccgccaacaatggtttcggcagcctggacgatgtggagcagttccagaaggagcaccctgagtgcgtcatcgagaacgagtatggcgatgagctcagctttgccgacttcaagaaatccgtgaaagacctgggacgggggtaaagatcatgaatattcagtcgctcagcgtcgtcgtgcccaacaagagctgcgtgaacaactgcgcgttctgcgtgtccaaaatgcactgtgacagctataagaaccagatggacgacaacctccccttcttcgatctgtacctgaaggactacctcaaacgcctggagtttgcccggcataatggctgcaacacagtcatgctcaccggcaattcggagccgcagcagaaccggaagttcctcacctattttgggctgttcatgcagatgatgcgggatccgttccagtggatcgagatgcagaccaccggtgtgctgctggatgccaattacctgcggtttctccgcaaccatgtgggcgtcaacctgatcagtctgtctgtttcggccgtggaggaagaggacaaccgggagatcatcggcgtccccggctgggtgcctctgaagctgcccgagctctgccaggagatcaagaagtacgatttttccctacggctcagcgtaaacctcaccaagtccttcgaccagttccaagggcgggaggccgacttctttggctgggccaagcatctgggcgccgaccaggtaacttgccgggtattgtattcggacagcggcgacacgccccaggctaagtggatcaaggaaaatgcggtcgcaaaagcgaccgtgcaaggcatcgtcaatcatgtgcagttctacggcaagccgcttggcatcctcccctatggggctaccaagtacgccatggacggcatggccgttgttgtggacgatgattgcatggctaagggcaagctgccggatgcggagaaggatgcctataaatacctgattttgcagccggactgcaagctgtattcccagtgggacgacccggccagcctaattttctgagaggaggcgccgatatgggaacgaccagaacgcccatccgcaagatgtatgaggcctgcaaggcctgcaaggagaactgctcagggtatggaacctgcaagcgcggcttcgagaattggtactcccgtaggaccaaggacaacggatgcccgttggtgcgccggcagcggaccacatgcaaacgctgtgagcaccgtatcgtgatgccagccttttcggaagggatctgttcccgctgcggggcacgcattgtcagcagcaatacgccctgtgaccgactgtgcgaaccatgcgctataaaactgggccggtgcgcaaggtgtgggttgctgatcagttagacaaaacaaaaggcccggagccaaagctccgggtcttccttgttagtcgttctcgaaatgaacgacggtaaactcctgttcctgcaggctacagtcatggcgcagtgttgtctctgctcacgaacttagcatccactggggtggtgcccaggcgtcttcgaggccggctgccccgttttctaacccaagcccccggctttagctacggggttcgtgacatttttcagcttcctccaggaatgcggccaggctctcggcgctgtactccacgccttcctggatgaggttaccccgctcatcacggaatccggcctgggtgttttccagccagtacttctgcatggcctggttgtagccggatatgtcgcccccgaaccgcttcgggtccggcttccgatggaaatgatacagggccgggcaatagtggttcagaatgtacagcagccggaatccggcctcgtccttctgcgcctcattcggcccgtacttggccatcatgtcctttgcccaggacttggactcctccacccaggtgaaaacctgaagccgcagtcgggcattctcttcgttctggagcttagaggcaagctgaactgctcgttttgtactcatgttagaatctcctttcgatttgctattttccaaattgggtactgcattgttttatgcaagcggctccgcagccattccggagaaaacgaaatcccccgccgaagcgggggattttgtgctcagagccgggcgaaaatgtcggtgacaaaatcgtactcactgtacacgattccgtcctcaacatagcaggggtagcccatgatggcgccagggaaatcgctggtgcggtcgtgaacgcatgcagtcacgaaatcacggtaaaccgtgacagtataccgcaggttgtccacggtcgtggtgtaggttcgaaggatatccttcggctccttcggctccacaaccatatagcccttctccagggcaatatagtcgaggaaactgaagtcccacgccacaagcggggaacccagcacctcataaccctcaggagcgtcgatgtcggcactctcgtagtagccggcaggagcatcaatgatgacgctctcaatgtagccggtgggagggtcaatggagatgacagaaggctcctcagcggaagttccgtggacgccgtcaatatcggcggcgaaagcgggagtcatcagggacatactcatgatagtgacgataacaaaagtgataaccttttgcattttgttctccttccggtgcatggcacctatgtgttgtttgcttttcccctatatattcaaatctcctcttgcaggagagaaacctggaaggcgcctttttacggcggcgcaaacctatatttgaacatcccagagtggaatggaatagttaatcctatgcatattttctgaaaactattccaatgaggaaaaggtcttttttaacgaagaaagcagcgggggaaattctcctttgctcataggcctcgccacatcggctttttcccaaagccggtatgtggcatgcaggcatgcttcctgcgcatagcgaaaccccagcacttccgttaggaagcactggggttttaggttgcctggtcagatgccaaggcccaccgtcaacaggtcgttgaggtaggcggagaacatgtcggagagagctccgaacagggtgccgagaacgatcagcaccaggatgaccgacaacagagagatgacgagtttcataatgattcctcctaaaaatatgtattctcctgttagccgctttcaaaagcggctgaaaatatgtaaacatcccaaagtggaatggaatatctaatcctatgcataccttccaaaaacaattccattgctgcttgttgcaaacaacaacggtgcagctattcgttttgcaaaacaactagccagcagtaacgcaaatgcagacctcacagaccaggcctgccgcgatgccatccggcaaagaaccaaatccccgccacattttttcgtcaataaagaccccctaccctactataacagcaaaaaaagcaacccggcgcctcccaaacgggaaacaccgggtcttgttgtcatgcttagaccgcgagttcagagaggatattcctgatgatattctcccaaacatcgttctcgggcaggttgcagtcctgctcgtcctggaaccggtccacagcctcatccagaatgtaaaagttgctgtccggatcggtagcgtcctcataggagaacccatactgctcctggaaagaggacagctcagcagcctcggcctcatcatccagagcctcgcgctcagtcccgaacacgacaaactccagatgacgctccgcgtcctgaagcaggaagatcttctgctgctctctgtacgcatcgtacagctcactgtcggagagctggaattcaagctcgtccagcgggcagcagggatacgctttgtccagaatagcagggagaggcattatcttttcgcagctgatgaccatgacctcagaaattttcttgcgaaccttcatgttgttttcctccaaatatgtatttatatccctaaagtgaggttctgctaggatactatgcaaagctgctacaacccattccaccggcgtcggaccagtaaattgttttccaaaacagccggtctaaaaatcgttgctgccaacgctaaaaaaacaatccatccgagtctggaggtaaagccagcatgcttcacggacccagcataggctcccgacgggagccggcccgcggccacagcttccagcaagacaggacctccccgccgatttcttcgttaataaagacgcgtaccacctctcccctgccggcataaaaaaaggagccgccccgaagaacggctcctatgctacgcaacatcatctacccagatgcatccgcagatccatgtattcctgcttattcttgccattggacaggacatagggcaccatggcaaagttggcgttcatatagccttcactgtccaggctgattttattgacccgcctggaggggatgtgcaggatatcacagatcgtcttatcggtcatccggttcttgggcgagaactggttgatcacaaactccatattctgcaccaggttggcaccccggctgcgggctagagaggtgatcatcacacctgccgtgcggatgccatgggtgtcctgagtcatggtcatgaccaactgattggcccggtaggaactggtaaggaacatatccagagcattctggtcgtcaggctgaatatccacgatcacataactgtaccgttccttcacggtcagccagtaggtcaggttcttcaggtcgtcctccgacagataggcagccgttccccggcggcagtcattgacaaacttgttgctgtaaagcaggaaatgcagagggccaggcagccgtttgtaaatcttggccgtattcttattggctgtctttacgccatggggtttgatgatacaccgggcggccatgttggtattattctgctgcagggctgctagagccgtgtccaatcccaaagcaatattgttgaactcgaagaaaccggctaccatagggaactgacggttgatttcgatgaagcaagtcttaaacccggcgtttgccagcgaaatagctgtgttgagagcaacagtggaattgcccactccatgcttggtgcccatgaaagcgattacgcggccatcacccatggccaactgccggcactcgacttcatcatctggaacgaccacatagtcatcctccagcactgtatcgatggcatgtgtcacatcgcgtgggacagctagggccatattctcaatcttctgctcccgctcctccagttccttgcctagccggatccggtcagcctggactgattccacagtggcggtaaggtcgctgatctgttgtctcagctcaccgatcgtattcttatactgagcccgctcggccagccatttgtcggtctgttccttataccagtcggccgacttggaggtctgcagttggaccaactgtgcctgctgctgctggagtgtcagctccgcagtatccttgaatttgagcagctgctcctcagcgttctgccgcagtttaatggcttcagcaagctgcgtcttgagggatgcctccgaggccgtcttctcacgcagatcaactgtcatcctggaaactgactcgcgtaggccctccatctcttccttcatgctcaatgtctggagcatgacctgctgttccacaatttttggaacttctgactgggcttctcgccgggcggcctccagcatggcgctgcgcatggcctcattgtccacatggggtgtttctacaaccctgatggcgggcgccgcgggcgcctcaggggctgcgtcaatgtggacagtatgatcggttggtttggtacccaggggcccaaaacccttcagcagacctccgagcaaaccgcccttcttgctgccacccgcctcagtggactcagccggctggattggcgcgttgggcaggtactcttccatatattcggtgtggaagtacttagccacatcgccaaagttgcggggccgcagcacataatccacgatttcagcgggcgagatggcgtcgccattgaggatatcatagatgcctaggaacaccagggagcagagcagcttactggtggtgggctgcttatttgccatgaagatgatccgcacctccgggaagttctcccggactgatttcatcagttcgaagatatccgtgccgcccttcagaccctcgcggtatagcagaatatcggcgcctgtctgcttcagggacggcagtacctgctcccggtagccggccgagccgacactcacaataccgccattcgtctgggcagtcagggagcggctgatcacatcttcaatttgtttagactgaaccgcgtataggattttttgcgtcatttttctcaacccctccttgttttggattcgtacggcctgtactgccgtttttcatagaacaagtcctgcatatcaggacctgtaaaatgatattgattaccaagctggtcaaatacaaatactgcctcgtgcagtggtttttcccgaagccggcccagggtcacaaacaggatattcgtgttcaaatctcttaccagacccgcatggaacaagtcccggcatacctcattctcactgggcgacaaaaccagcattcgcagagtctcaaaggccgtcctgtccagccgagctgaagactgctcccaataggcaattcgcttgagcagagctactggccgtttatatccgtcaatggccaggacaaattgccgatctggaagccggcacagccactcccctgtttgtacaaactctggagggttattggccacgacgatgcctgcctgcctaagctgggccaggaaggagtcctcatgccagctctgaccgccgatcaactctctggcgacctcaatcatctcctcgttactgccaatgtagcactcaaacatgggccccaacaggtccatggatgtctcagccagggaccggacgacaattttacgccgggcggccagcttctttacattttcagtggcaaagagaacgatgatgcgcttcttgcggtgaagctggtagtcgcgggagaggaaatagttgcgatagtgggtccatttctcccggaggatcttggactcctcattgcccatatccatctccaggaaaatgtggaagtcgggcaactccaggacgccatccggctgcgcatagcagaagttggtggcaaagaggttgtctttatagcaggctggatccaggctgcagacgcggagtatctcaagagccaagtcattgagccggcactggtggtccaagatttgatccttcatccgcaatgatccggccgaggcctcatattgtttctttccgctccgctccttgaaggagtacatggtacgccttgatgtctcccggacatactggacgccgcgcttggtgaggaaataaacccagacgcccggtttgtactcatgggcgtcaatgagccagttctctaccagttcgttgatgcgcatgagcgtgtagtcatttttaccgtcatccaagtccttgtaaaagtattcagccagctgcctgtcgttgaggcagcggtggcggtaaataccgtggagggcattgtggtcttctggggtgataatggaaaatgctttttcaactgctctggttgccaaagtgtgagccctcctttctttctgtttaatattctatgcaaagttcacccgctctattggcggagcaaatatccggaacttgtctgggttgtcgtgccaaaccgtctccatccggacagactttgccaggagagtccttcgcagagagttggacaggtcttttttaacgaagaaaagaggcggggagttttgtttttgccgggagctttgccgcgggccggttccttcaggaacctatgccgggtccgcgagtctgcctgcacgcaagaagaaaggctccgtatggagcctttctttgcagctatgccgtctttgccaacagcgcagaacggagatgtttcgccagttcatccggcgacagaggaaagaatccggtctccgggcacggcactacataggcgggctttccgccatatggtttatggacctccacccgccgcacccccgggacctcctggcggaagtccagaaggattgcctgccgctgccgggcgtccacgcccagcgcctgcgcctgctgagcgcgcagtttcttatacttgccatcccgcagatctacatggccggtacggcgccagtatccagtatagtcgcacaaaaattctacatgacacacctgaccgttcagccgaacctggaaatcacagtcggcacctgtttgacagtactggagtatggccctcctcttatcagctcccgcagctgtagcttcacagccagcctcagtaagcagatgaaggaaatagtcctcaaccagccaggaggccaccagatcccgggcatactcgatggacgagcgtccatcggcacagtaggcacagctctggatgttctcccagatttgtggaaagtccttctggagctgcttattccgccgggccaggatcaggtagttttccttgctgtagttaaactcccgggccatagccagcaccggttttggcaatagctgcgatgcgctttgataggctcccatgattgttttcgcctccttggatctgaaactgccagacttattttcccaatgtatttatatgcaaatggtctacattgtattttcgggatgagaaaggacgacggaatatctgctgtccttcttcgctctcttgtagttaggtcccctgtgatgacacttagcccaggaagttccagaagaacgacacaacgacccaggcaccaccgaacagtgtcagggcgataccggagaccagaatgccggagagggctcgctgccgggcctgagggttgccagccgaagttgccagtcttgtcacgctgattaaaaatgcaacaaagcagatgatggtacaaatggccgtgatgacctgggcgacttctcgtacttgtttcattacatggtcttcaaaagcgtcctttaccccagtagtctgcgtcatatccggcatgtctccgggctgaattttgacaccattaccatcaatttggatgtcgatggcggcggcatgtgcggggaatacaagaccaaagaccgaagtaagcaataccggaaaagacatcagccaaatgtagaatttcgtgcagagcttccgcatggataacacacctccttgtcagaaattagaaatggggcggcggaaaaccgccgccctgttggcatagggttattgtgttggcgcttagttgaggaagttccagaagaacgacacgacaacccaggcgccgccgaacagtgccagcgccacaccggagaacatgatgccggtgagagctgtcttgcgagtcatggggttgccggcagacatagccagtcgggcaatccagaacaacaggcaggcgaacgagataatggtcagaatcgtagtcactgtctgtgcgacctcacggaccttgccttctactgtgtcaagatcctgattctggcccaggtcttgcgaaggattaaagttatcgctgaacagatcgtcgacggtcccagtcgttccgccctggccctgctggccattgccggcgtgagccgccacaataaagggctgcgaccatgcgccctcctggttcgccatcccggtgaagccgccgatcatgccaaagcacagaaagagcatggcaaacagagcggcagcccgggtgcgaaggttggttgcgagtttcataatttttgtactcctttctgcgatgaacgcaaagtggtttgaatttgccttacagagcattgttgtgagaattgctcttatggcattgtgcaatactatgcacgcgcttcaaaagttattcccattttcgcctcgctcagcatggcatttttatactatgcacattcgccaaaagctatttgcctttttgggcagtttcatcagagcccggcaaatcagcctgaagctccggcatcttggacgcacctaccatccccaatatccctgccgctaggctcagaatagcgcttgtgagcagaatatagttcggcttaggcttcattgggcacctctcccttcagtaccttggccgtcccaatccaggcaaagatgaccgcaaccagcgcaagcaaattaaagctgagcactgtgtatatggtcatcaacacagagccggcaatggcctgcttgcggctgttcgtcctccaggcagcgaatatcaggatcgtaccaacaatgagcagtaccgtgacgacgagcccgatgatgacgatcaccattgtgaatcgaagcgagatgttgattagatcatcggcatgttcatctatatattcatttatatcgtctgcggtgacagacggatcctgaacgccaaaggcatcttcgatcgatatggattcatcactgaacagatcgtcgacgccgccaggctcgataatataaccagagtcacttccaaatacagttgttccataaccggcagtcgccccgtacgcagggctaataaacgactcctggaatttatcgatgatggatgggacggcagagagtccaatcatggaaagcaccagccccagaaggacgagtacagaaacgatgctcccgaaaatcccagacaacagcaaaaaggtattggatttaggtttcataacaaaaatactcccctttcttaggtggccatgttgctaaccaccaatggttcatggtatgctaattgcgctgaaactattttgaggagccatcatggacccgacataggttcccgtgaaggaaccggcccgaaccacagctcccggcaaacaaaacagaccacctccacatttcttcgttaaaaaagaccttcccatccatccgaaaatataaaaatcgcaaagtgcatataatatatatgaggaaccagataatcaacccaaccaccaagaaaggagatctgcctcccatgcgatatatcaaacccctagcctgccttgccgcctgtctgtgtctcttgacctcctgcggcagcaacccagagccagtcgaagcaggcctctcccctacccagatggctgcgtccatcctcaacagccaggactatgcgcaggatttcatcctcgccacccccggccaggatacctacgagctgcttgtcgataccagttacggcattcctgacggctacatcacagacggcgctatctgctaccttggtggagtcgaagcctccgaaattgctattctatctgtagacagcgaggaacatatgaccgaggtacaggcatgcctgtctgagtacctcctgggccgcgcagcctccttcactggctatgcccccgagcaggcagctatggccgaagccggagttgttgagtcgatcggcagctacgcggtcatgctcatctgcgaggatccgaccgaggcccgcactgccttcctggattgctttgacccggatgctcagcccaataccgactatccatttgtgtctattgaggctccgaagccatcaaaggcccccaaaaacgacagcaacgctgcagatcctacttctacctccacacctgtctccagtggagacccggagccggtgacgcccagcgttgaacctgagctatccgctcagccagaaccttacaaaccagtcatctcgcccgagcaaaccggtccagtccccggcgacggccagtacagcatggacgctatcctctccagctatcagagcggcgatacatccgggctttcggagaaggactgtgcgatctatgaaaaggctcgctccgtcatcgcccagacgatcagctctgatatggagaagtgggaaaaggccctggccatccacgattggatgactcacaaccttgagtatgacccagacggcctcagcaacgatcctaatgtcaaagttgacccggacagctctatcccctatggccctctggtcaacggcaaggctatctgcgaggggtacagtaccacctatgacctgtttatgaagatgctgggtatcgattgtgtggtggtcaaaggcgaggccaatgatgagtaccataactggaacaaggttaagctggatgacggcaactggtactgtgtggatgtaacctgggatgatcccatcgatgccggccccatgaactactatttctgtgtatctgactcatttttccgggatgccggccgaacctgggaggaaccgactccaccaactgtggacttcggcgactacagccgcatcaatattcttcaaatgctggccgagagatcatcttgaacgaaagaggtgtttactatgttgttcaaaaagaaaaaagcggagaccaatacgattgaggtccccactgaaaatgcaagcctgctcaagcgatggggtaatcccggctacctgatgatgcaccctgagatctccaagagggctgttgtcctggaatttttccgcagtctgttgtatctgagcttcgtctgcgtcgccggcctgtggatctgtacggagattctgaccttcatcttcatggttacgacctacggcattcttccccattaaggaggtgcttttatggcgatcaaagaaataagcggtcacatcctggagattggagaccgtgtgaaaatgaatatccccaaaatcggcgagggggacatggatggagtagagtttactctgtctggagagaactactggcggtacatgaacacccatccggacgaagtctacacggtcgaaggattcgacaacagcggagctgagccgcagtatatcctttctggtcgaatgggtggcaacacctggtacagcgacgagctgctcctgcagccggcgcctcaggaccggtttgaggtcatcaaaaacatgaccctcgaagaaatggccaaggacctgctgccgatgattttgggcctgtgcgaagaaggtgtcccctctgcggagctggtccaggaatggctctgcggaaaacctgaagaagaggcgtaatcatgcacaaaattttccaaaactgcgtcattttttgaggtaaaatggcagaactccttgcctcggctctctttcagtgtgaaaaacgaggaaggtgagacttacctcatctgtgcgcaaaacttcaacaccaaagaacagctgactcaggtcatggaagggtccagagggcgggctatcctggcctttgggacaaatgatctcgacatctacaaggccagggctggcgtattcatgatcgactggagcccctgccctggtgcatccctgatgttcgaggtctctgaacaggaatttgagaaaatcatgcgtgaggagtgagttttgtggtaaaatggagcgatatcctctcccccgctgccctggagaaagcaaaacagctccaggcccgggcgaaaaaagagggggcaaatgggcacatcatctatcctcctcaggatcagatttttcgagccctgacgctgacaccgcccgaggcggtcaaggttgtaatcatcgggcaggacccctaccatgggcccgggcaagccaatgggttggccttttcggtagctcccggtgttgccatccctccttccctgcgtaatatctttaaggaactccaagatgaccttggatgtcctccgcccaaatccggagatctgactccctgggcagagcggggcgtgctcctgctcaatacttccctcacggtggagcagggcaagccggccagccatgcagcctggggctggcaactgtttgtttcagatatctgtcgggcctgcgtggctctaccccagccaatcgtctttctgctgtggggcgggcacgcccgttccttcactgccggcctgcagatatattcccgctcggagaataaatgcagcctgtgcagcagtcatccaagccctctgggagcaaccaaggccagcggcggagctccagctttcctgggcagccggccattttcccaggctaatcggtttctgaaaacgatgggtgccgccccggtaaactgggtgctgccctgagaggtgatttttcgatgaaagaacgagtcaatgtgtgcggcgtcccagaatctgagtggagcgatggcgtctgctatcggtgtagatcccagtgccaaatctcggaatatggtatcgtcagcaagcgagcctacgactatgccgaccggcacttccttttggacagtgggtacttttggaaggagcatattcgtatcaagttggagctgataggccgcaagaagaaagtccccaagtacttgcgggatgaggtctccttcgagggcggacgcagcttcaaaaccttggatgagttcccctgcggcaagcccttccggtgctgccgggatagtaaagatgggacctttcaggtgggcgatacggtctggcgcgatgaacccaggcccgggatcccggatggactgaacatcgctcaggcagccggatgcctggacgcagagttctgcaaggcagctctggagggggccttgtttgaggagtcatttgcggatatcccccggcgaaatcgctaaaacacaatttgcatattattcccacagacctcaatttggaaattcaaagtctgtgggagaaatctaagaaaggagtggggctgcatcggtgcagcccatgaaaaccgatgaagtatgtctataataagatcgagcggccggcagtcccgcttccgatccggctgtctgcagtcgacccgatctgcctggacatcctatataaccgcggcatcaagacgcctgctgagatggaggactttctcttcccttccctgaccaagcagctgcgggctcatccgcccctgctggatatggataaggccgtgtctatcctgaaaatggttgttgccaacaaggaaatggtgaccatctaccacgactatgatgtggatggcgtgacggcgggcgttacagctctgtcagccctgtcccagatgggcgtgccggtcaaccattactgcaacgaccgcatcaccggcgggtttggcatcaatgcggccggcgtggatgagatcatggctaagttccctaataccaaggtgctgctcaccgtcgataatggcattgccggtatcgagggggtggctcgggccaaggagctagggctgaaggtcatcattaccgaccaccatgagcctggcaccaagctgcctgacgcggatgcggtcatcgaccacaagcgggcggatgagctggccgggcaggacaagaactgctgcggcgccggcgtcgtgtggaaactaatgctggagctgtatattggccttggccgcaatgtagaaccggttatggacctgctggacatcgtcgccctgggcacgattgccgatgtggtgcccctgatcggggataaccgggctattgtgcaggaaggcttgaaacgcatcaactcgggcgcccggcctttcttccagatgtgtctggaggtcctggagaaagagtctatcgacgccatgacggtggctttcagaatcgcgcctatgatcaacgccgtgtcccgcatgggcggcgacgcgtcgaagctcattgagctgttcatggagaccaacgccgacgacctgagggccggcatcattgctctggacgacatcaatgaagcccgaaaggaggagacacgccgggagactgaactggccaaggaactggtcggcgaggagcctgtgggggccatcgtgttcaaccatgagtctctgcaggaaggcatcgtcggcatcgtggccggacagctgaaggaggagttctccctgccggctgtggtactggcaaaggacaaggacggtaactggaagggctctgcccgcagccctgagggattcatgctgaaggaggctctggatcagtgcgctgagtacctgatctcctatggcggccatgcgaaagcggccgggttaacagtgagggcagccgacctggagaagttcaaggagaagctcactaagctggccctggaggccgctggagacaaggggtttgaggtagcaatccctattgacgccgtgctgggcgcccgggattatacggaggatatggtccggcatctgggcattctggagccgtttggcgagggattccgccagcctctgtttgggctgattgctgacaatatcactggggtccgatatatgggcgccgaggaccagcatgtcaaataccaggatgaatcaggcctgcaggtcatccagtggaacaagggtgacgaggccaaggcccgcaagacgcctccgaagaagtttgtggggtatccggggctgaatgttttccggggaaatacgaccgtgcagttcatcgctgaatgagatggatataccaaggacctgtccgtgaggggcaggtcctttcttttgggatggaatgggttccggtgattcggcataggatagctccagaccaccaatttggaaaatatgcaaaccccacaggagaaattagagttaggaaaaaccaaacaaaaggggatccggtccctttttgcagatctggaatggctaatatgctgctgcccaccgtcctgaaaggaagtggacaaatatgcatattttccagaagattctagttcttgcctttgcagttgtcgtgttctcctgcgcggcagcgtgcgcttttgccgtcttgcggaagcctgttatggctttcttgcgcgaactcagcggacttctcgttgcccataggcagcagatgtccgacatccgcgagaaagaacgagcttccaaaggcaaggcggtgactgaactggcgaaggcgctgtccaacactgtcattaagacaaagctgaacggcgcctttccagaactggcaggcctgatcaactctgcaaccggaccccaaccgagtcagagaaatcgtctgcccaaattgatgctggagttgcttgttgcggcgctggtcacgctgctcaagctgatctccaaggccctttaagaaaaagggcagcagcctatataggctattctcatcatatgcaagaataccgaaaactattcgccgggccttttggttcggcgaggagaaacaatgtatctggaaaattgcatatcgaatctgtacaaacggctcccaatttgggagctgttttcttttgtgccggaaagtccatcttttctaacgaagaaagtgggcaagagcgttctctttgccgcaggctcttgcctcagccggttcctttcaggaaccgatgtttggtccgtgggatttccctgttgttgcaaacagagagccgccatgcggagccctcacggaccccacataggctcccgtgagggagcccgctcgctgcaaaagacatcggcaaggaagacatcgcccgccacatttcttcgttaaaaaagaccctactcccccatcatccacagcacaaaagaacagccccaccagatcaatctggcagggctgttttgtaatactcccattaggggacaaggaattcagagatgaccgcagccggctcctggtttgccttgtcgtggatgaagatcagaaggtacgaatccttcccaatgtcctggaagacatagtagttcatcccaaagtcccactctctggacccgacatagacagccttcctatcataggaacccttcaggaaggtgctctcatcgcagccccagaagtctgtgagcagctccgcgatctccgcctcagtagcgcattggctgttggagaaggttgcgctcatttcgcccgactccacccgcagctgagagctgtagtcgtcctcagttgtccaactggaggaggtgggcaaggcgtgcttttcggtgtaggaccaggcaatctcccgctcctccccatcacgctcagacggcgccaaccggtcggcatattccatctccccgaagaccaccgccggcggttcctcatccggcaagtccttaatggactcctccggcttgggcgccggctttttttgcttttcggcctccgcaaactgctgctgcgaagactggctctcattggcaggcatcgcacaggcagccaacccaacggccatgacggcagcacagatcatcgccaaaatctttcgtttcattctgaaaaatctcctttcttttgcccaagttccgggtgcaaatcctaattttataatatgcggcttgccgcagaacgattgtcctaaagggcggcccctgcccgcaatggacaggggccttgggtcgcatcagctccgaccagggcaaaacttgtcgcagtcgaacacggtggggttggagtgctcgccgagtacagggcagtagccgcgctccttgcaggtctgccagggctcggccggctcatcgtccccagggacatcctcgaaatcgcagttttcctcgtccaactgcatggactcatgggccggatccaggttgctgggcagagcgacttcatccatgtgctccttggcgtactggagtgcttcttccagcgtcatgtggtcggggacctggatgctggtgtcaccgatgctggtgacgaaaacggttaagtgcagagtcttcatgttgttctcctcctattttgttttctcctacattggaaaatctaaattgttgtatgcaacgacgaacgctcctattctctgtcatcctccggctcggcaggatcatcatcgaaaatattcatctcgatgtccccaccgtcctccatggtgatgatgagggcgaacacgccgtcatcaaaagaccatttgtctcgggggtacatccatggcctgttgcggcgtggcaggcatatcgcggcaaaggagcgaacccagtacatggctgggatctgctttcttctttcagaacggcagggcgatgcccagctctcgtttctcgacttcggcctcagcctcccgctcccggggtgtcagtggcagctgctcaacgcggatacagcggacatccttgagagaagcaggctgcttagtcggccggctcagagcccgggcattggccgcggcctccagttcagcctcctgctcccgtagggtcaggggcaggcgctcggcaatatttctcctcatgacagcaccctccttaatctttctggaatttcagcacctcatcgtggggcagccacagatcgatccgccctgggccgatggtgatgcattcgaccttggcgcccgcatactggcaattttggatcttgtcaggagtgccggagaccagcttcttgccgctgccgttgtcataaacggcgatcatgcagtgggctgccaaattggcgatggccgaaacgcaaacgatatttctcatgtcatttctcctcttttcttttcgatgtactctcgatactgcttttccttcaggtaaccgcgatcagacaaggtcgggtacagaccctgtttccgcagctccgtgtaccactcgccgggcggatacttcggccacaggctttcgaatgtcctccagatgccgtccacctttaccagaggcgtggcctccagattgcgcagggggcgcgggtcgtcggtggtggagtatgcgtcgcaggacagcttggacagtttcatgtcgtccggaatggtaatgcggatcagcccgtgatccgatctgggcctaaggttggctgccgccaccaggcggaagtgggatacaggctcgtccggaaggacgctcccagccaggatatagcggtagcgttttcttttctccgacatagtagattctcctctcatccggcgcactgccggattgaataatttcttggtacgacggccacatctgcatacggatagatgttccgaatgagcggacagtcatcgtaggtgatgacaatatcagctcccggcatcccctgatacagcatctggatgatcatggcaagctgctcatggtcatcctcctcgtaccaacgacggtaaaggccttttcctttcgccacatagggcgggtcgatgaaacaggtggactgctcatcccagtaggcactgttctccagcaggtcgacagcgtccacgcagctgacctcaatttgactggccagtgcatgaatgtgccggatccggcgctgaagtacatcggcattccagcgagagagcagctgctcttgggagccagtcttgccgcccatcgcacaggccttagtgataccggaatagcccagacggttgcacaccagcgtggcccacgccaggtcgtcctgagaccagcccttgggcgaatccaggatctgctggcagctccggaactcagcccggttaggctcagaccctgacagccgcttgagcagtttctccgggtggtggacgaccgaatcccaaaaagcatatacgcccggatccgtgtcgttgatcaccaggcgctcggtgagccctgcatccagcagggacaggccaacagaggcgccacctgcaaaaacctccacgaaggtcttcagcgactccttgcggaactgggctgccagatagtcgatgagcttggacttgccgcccggataccgcagcggcgacagccgcttcttcagggccgtcttgggaaccgggtcagccttgccgccatccttctgctccaggatgagcagaatgcggcgcaggcggttcctggcctcgtcgtagtaggtgaacccatcgcagtccggacaccagaatccctcgccgttgtgctcatccagctcaaagtcgtccggacccccagatgccccgcaccattgacaggtcaatgttttctccaatagatactcctcctttcagaaaatttctcctatgtattcgactccaaattgggaatctaaactattctatgcaggttgaactattcgtattttgggcaaaagaaaacaggcctgccgtatggcagacctgtcttttgccagcatcagccgttctggaaacaccacatataggcgagcgcctgggtgcggccggcgaaccggacgcatgggtccttgagcatcgcccgcagctgttccttgctgaaccaggctgggctgatctcctcgttgggattgtcgctaggagcgatggtcccagccgcctcacagacgatgagcgccgtggtcatgtcggttactggggcacagctgaaggcaaagggcagggcatccaggagcttggtgagctccaatcctgtctcctccttcagttcccgggcagccgcctgctccggcgtttcaccggcatcgatgaatccggagatgttgttcaccacatgacagttcacgcccatccggaactcgatgcccaggagcatgtgctcatgggccgcatcgaagaccagcagaacgatacctgtctggccctgcccgatggcaccggctgtcaattcccggttgttgctgaccatttcgtattgtttttctccgccgtccctggtctcgtaggaaaactcgtacttggagaggtacttgccgggcgagaccagtttgatatctttgagctttgccatttgttcgtccctccttagaatgccttcgattgcatcatgatttccgccagcgaccacccctcgctccggcggcgctggcaccagttttgcgtccgcagcatctggctcctggcgcggtcgtaccggagccgacggttatgctctgcctggaaggccgctggggtgaatgggaaccttgtcttgggtacatagggcggcagccgcagggccgtcagatcgcccttgatgacccggatggagatgtcccgggcccggcagtccggaagcccagacaggcgaatggaactctcgatctcatcaatgagcgtgtcacgcctgctggtcttgatctctgcatatgccaggtggggcgcgatgccgatgagttggttgagctgttcgatgtactccttgcacatgagatgattcctccttttggttatacaatctccatggattggatttctgttctatcctatgcagattgcgacactctcattttgcgggttggggtttcgagtcttttctaacgaagaaaaatgacaggaggatttccctttgccttgagcactcgccggagccggttcccttcaggaaccgatgttgggtccgtgatggctccgcacctaaacggcccgttccatcatgaggatctcggccatggaccagccgtcctccaaccgctgctggcacatttgctgggcggccaggagccgctcttgggcccacttgtagcgggtacgccgctcctcttccctccgccgggcgccgggaagcagcgggcggcgcgccggttcctgatagggcggcagctgcatagaggagaagtcgcccctgaggacctgcagctccatgttccggcccagcgcatccagcagaccggcccggaggaggcattcctcgatggtatcgaacagggtctccttgtgggacgaccaaatctccgaccgggccagggtgggcgaactgcggatggtctcgtttagctcgttctcatattgcttgctcatcatattagcccctctcccttctatgcagattcgaatatcctgtattatgcaaactgcacggagttcattcccagccgcggaaaactggcggtcattttcaccacacagctttgcttttacaaagctgtaggaggctgcatccggggattccgccctgccatagctgccctccgcgcttccatgcggctgtaaacggtgagctgtcccaccgttgtgtacaacattttagccggcaggtctcacggaccagatatgggctccgggacggaggcggcccgcggcaaaagatttggcaggaaagaaatccccggctgcttctctcctgtaaaaaagacatgtctaacaaaccttagctgcaacagcgggagcgaatcccccttgccagacagctccttgacccccgccagaatgacttttatgcatttggcatactattcattcagcacccaatcatggaggcaacatgactacaaggaggaaaaactaaatgagtattgctgatattcgaacctgcccccgtaaggcctacctgcgtacggctgtcgactctggagttatcaaggccggcattctgcgcggcattgtgaaggatgtccttttgagctctcccttctctactggagaggcggcgctccggaagcgcatccgtgacgctttcgacaccaaggccgaccgtctgctgccctttgaggctgaggcagagcgggagcgcatggaggtcctgctctggagatatctggagtttgaacgccggcagaagaacaagatcctggctgagaactttgtgaacaaggtcaaggtcatgggtgacgaccacagcgtctctgcccaccggctcattgaccgtggcacggctctggagtgcatccggtatctctataagcagccggagatgagttatcgttcccgcaagacgccggtggagaagaacccggacctgctggctctgcagaagactggcgaggcagaggcggccaagctgggcatcaccggtaagcatgtgttcggcagcttctactacctgaagtcgtccctggacacttcccgcagcttggagtcgacctttgagagccgacttggctccaacattatcaaccaccacttcacccctggtgaggaggctgcgttggcgaaagaactgtccggtcagaaaccggatgtggccctctgcactgacgatgagcgtgagtgctatgattgcatctacaaggatctctgccacacggagtttgtcaagcgcagcctggaggaaaagcccactgtggaggaaaaaccgctggacagcatccacatgacgcccagccagcgccggttcgtggagtttgaatcaggagaatgccgggtcaacgcagttgctggttccggcaagacgaccatcgtcaccctgcgcaccctgcgcctcattgaggaggggtgcaagcctgagcagatcctgatgatcaccttcactgacaaggcgtgtggggagatgaagtcccgcctgcaccgctacgcatgcggcagcaccctgaaagatctgaacattgagaccgataagatcgtcgttcggactttcaacagcttcgggcaggagctcctggatacccactatgccaagctggggttcacggaggcgccgcagctggtggatgaaatcctgaagaaggatatcattgtaaatttgctggattcccaccgcacactgcccatcgactatcgcaaccccttcctggacctgccaaatgcctgcggcgctgtcgtccagatcggtcgtatcatcgattccctgaaggccaaccatgtggaaacggtcgatcaggtggagaagatggtgaccatggatatgaagccgcgagccaaggaactgctggctatttatgaggcgtataacgccaagttggtagagctgaataagattgactatgaggatcagctgcggctcatcctcaagctaaaggcgttcggagtgttcgaggatctcccctaccgccacattgtagtggatgagttccaggacagcaatggcaaccagatctctcttatcctggagatggccaaggccgccaaggagctggagagcatcgtggtggtcggcgatgagctgcaggccatctatgggttccgcgatgccacgcccgagaacctgatcaagttcagcgactatttccctggcatggtagacatcccactggaagataacttccggagccagtcgcccatcatcgagatggccaaccgcatcctcagccgcgaggcccggatcgccaaggtcatcaaggcccaccgcaaggaggagggtatcgcccctgtactcatggacatcgagaaagcagacgccgagcgggagctgtatgtgaagcagaccaagaaactgcttcgggacggcgtaaagccgcgtgacatcgcagttctctgccgtaccaagtctgagctgatcgcagtccagaaggaaatggaggatgccggtattcccaccatcctccgggtcccggaggtcatcggggacgccccctatgtgaaggccatcattgggctggcttccttcctgctcaaccacgaggatacgctgagcctagcattgtaccgcaagagcttgggaggcgatccattcgatgcggatgccctgaagaaggacgctgaggagctgggtaagaagtacgatgaacttggcagcgaagcagagcggattgccctgtttacggggatgatccaggatgcctgcgaggattacattgccaaggcattcgccgaggatatcatgaccaagggtttccacacggctggtgagattttccggtactgtgtgaagtacaaggagtacaagatcaaggagactaagtctaccgcccatgaggatgcggatgccgtcaacctgatcactgtccattccgccaagggtcttgagtggcctgtcgtcctcctgtccctcaagaagttcaagcctgccaatgaggaggagcaccgccttctctatgtggcagtgaccagggccaaggaaaaactgttgattacctataataagaagcagcagaccctggttgccctggtatcctgaacagacaaagaaagcccccgtccatcggacgggggcttttgttatggggtagatgtgttagtttggaagcctgttttcaaggtcagacttgccacgggccgggccgttgtattctggctccttatggaacccatcaccatcgatacgctctggggtaggagtctcagccggaggatgaccaccaccgccaccattgagcagctgctctccgccctgtccaagcgaagatagagtcggagtcagttgttcagctggagctgtggcaggcggagtagtcacaggcatcgtactctccaacctgacaggctgaaccttgactgggtcagccgtgggaatagtcgcgggatccaaaacggctccaacctgaactgtaggtgtggccgcgttcattgcctgcgcctggacatcagccggaatctggacattgatagcgccgttgggagccaccgttgcattccaggcagcatgctcaaccacaggttgagccgccttcatcccctggaaggtttcgagactgcctgcccgcacattgacggcatcaccaacggccacagcctgaacatcaggctgtgcattgatctgactggccaggttatgcgcagcgggcgtagctacagggatgctgccctgagaggctcccttgcccgtagccgtataggcattgacgaagtcggctgccgggacagtgaccgacgctgagccatcctcggcaacctgcggagcgctgaaatgcgaggccatagcggcaggcacctgcgccttctgaaaggcctgtacatcggcgccactgatcgtgtaagtctgaccatctgcgctgggcgtaacattcagcccctggttgcccaggctcgctgtacccgtatgaacggcgggagccaccatcgtgggcatcgtcggctgggtcgtaggagtccccatggaggtctccggcgagatgccggcggccatagcgcgagaacccattgtattgctgctggcagcaacaggtccgaaggcgctggccatatcggcctgagacatcgtaatagacatgctgccgtccttgccgaccttggcagaggcaacctgggccgccatcgactcaggcatcggcgtattctggaactttgcagccggagcagtcatcgtaacagcgccagtattggcatctgtgctggtctggaaccccatcgactccatcttggaggcgccgagggctgcagcagccttgggcgagttcagcatcgaaggcatatcagggaccagagcaggagcctggtcgccatgcgcggttacagagtagccgcccctcgtggagatgccgaggttgtctcgggccttatcgctgtcataggtgatattggccccagtcataacctcttcgccattcactcttttggtcgcagcctcaacccctgtaatacccatagcccgcatggcggcacgctcttcttcggagccattttcccaggtgttctgcatctcacggagacgggcctggtcgctctggctcatcttgctcatgtcgtaatggacattggactgtttctgcccggcactcccaacgctgggcttgccgaaactgataccagctgccttttgaccatctctatcgagtgtataggtgctggccccagtcttgctattgtaagaacgctcagcaaggcccttgccgtagacattgtctccgtctctatagttaccgcggttttccaaagatgacttataggcaaccgcttctggactgagagcaggttctccgccaccacccagaggaggtgtcccactaccatcgttagagcctggtttgggatcccccaggattgcgcccgcagcatcggagccagcacctttaacctgagacttgccgctctcaacagtcttgttgccgagctgctgcaggggtttggagagagctccgccagtgaagtgccggtcgactacgccgagcgtaccggcagccataccaacgccgacgcctgcagcaaccttggctccgccacccagggctttcgcacctgcgcccaggagctgtccgccggtagagttggcaatggcattggccgcattgcggacaccctgcacaggagccaatccgccaaccttgctggtcagattcctagctccctgtcctacagtggccaacgcccggccagctttggtttcgttcaagaaccgctgtccaaagctggattttgcagccgccgcgccgccggcaccaccggcaccgccatcaccgccgccatccttgccgtctccgccctctttgctgtcatctttaccatcgctgccacccttaccgccagtgagagatctaatacctccaccgatggcgccggcagcaagaccggcgccaagcatcatcaggccgcggccagcacgctggcccttctgaccgacctggtcggccatgccgccagaattgccaaagaacatctgacgcagcagattcgtcaggggaatcatcacataggccataacgatcgagtcgatattacggcctgagtcaggcaccaacagaatgaaactgagcatcaacgcttgcaaaggttggatgaacaggttcgcacaaaactctctgaaaaagtcaagcgtctgccggcgtttattctcgctgatagccatcatggagataaaaatcggcatcagcacgatcatcagagccagggacaaagcgcggaatacatagaaaacattgaagtagatcactgcgcccagatatacggcataggagaggatagcgccaaggccggcaccagagttggctgccagcttctgaaaccgttcctgagccgtcttgccgcccagtatatcatggaaaataccagtcagttgagcacaggtatcaatcaaaatagggatcacataggggatgacagccagcaggaatgctaccaagaacaggtatttaatctgctcgatggcgctggcacgagcaactggatccatggtagacatggcttttttgccaacattgaagatgatggcgtagagcaacatgataacagctgcaatctctgccacaaagaagaatgtccaaattaccgactgccaactggaagggaacacgccacccacataggaggaggatccacgaacgccgccgttgaaaatcaattcatcgaagttccaaaggccgagggcgttggcaatccagtctacgatgctggcaataccttcggcaaatgcctgttcgacaataccgggtgtgccgtcgttaacattagatgctgtcacgcgcagttcatcgtctgcgacatagtttgcaaatgcctctacagcaagagttccccagtggatgtagtaatcgttggccctaaccagagtgtcgcctctcgtctgaccaagaccagacttatccactccataacctttcagcatccggtattggaaagtgcgagtctctgtttggctgccaatcgttcgttcaatagaaatgtaataatcagtaccagcattgctgtggaaattcttatccacaggattttttggctcttgggtggttaccactgagcagccttgctcctgccactgtcctccgggctttaggccgctgaagaagttccccagatctgtcgcatattgttttacctgttcatccagggtatccccctcgggctcatacataccatactggtcaccatagacaaatttgaaagccgcattcaggtcatagattagagagttacgaatcagctgggcgcggtcaatatcggcctgcctggactcatttccccagccggaaaagctgattgcgccagggaagctcaagggcagattatcgaccgtattgccgccctgtttttcgaatgtcccgcctgtcagaaaactgatgatgttgctatcggaaggagtcttcgttttaatgagcatttccatcagatctttaccaatacgcttcgcttccattgggtgtccgttggtactaacgccatgcgacacaacggcagccacaatttcccaggcggaggtgtcgacagctgtctggatataggagcgctgaacaggcaggataggtgcccaagcaggcgatacgaagccgctgaccagaacgccaagcatgatgaccatggccgtcaggaatgcccagatccggcgcggcagactcgtaatcgtttgagacatgaatcttttcaactcctttcttgggccgggccccgaagcgcatgctccgggggcggccagagtttagtgttacttgcggccagcgatcgttcgcttttcgatgagatacttttcgatatccatggggaatgcatacccaatggtcgcctccgagttcatcttgagcaggaaatggccgcgggccggcgaggtcaggtaggaccgctcgccgttggagagcttgaacttctcctggacggcgtccaggtccgtagagctctgcttcagaaagatgttaaccactgcgttggagaggacagcctcgccctgggggcagctcacgaactccttgaagttctgagaggccaccagcaagcagcagttccgcttacgggaccgacgggaacaggtctcaaggaactgggcggtaaactggaaaccaggcatattgggattggtcagcatccacgcctcatcgcagacgatgcgcttgcggagcttggggttcttcttggcgaacttctcccaggcccaggacagggcattatacatgccgatcggccggagcacattttcctccagctgcttgatatcaaagcagatgaccggagcgtccgtgtagttggccatgtcctcagaggtggtctggtcgaacaggccatacacgccgtccctcttgaacatgcgcagggcgttggcaaccgagaccagagtctcattgccgggcgtctgggcgatctcttccagcttccggtggaagtcggagaaggttggcatggggcgcttgtggccgtggtggacaaactcgcccttgtcgttcatcaccacatcgtcatcatacagagaggtataatcctcagagaaaccgaactcctcgtagatgctggccagggcgaaggagaccagagagcgctgctcctgggtcagttcgccagtcatcaccccgatcaggttcagcaggtcagccaccttttctttgatgttgacgatgcgctcgccggtggcctggccgtcttcatccagaacttcctcatcctccaaatcgaaggggttggggatggtggtagagccgggggcaatcttgatgaccttgccgcccagagcctcggtgatggtgctgtactcgccttcagggtcgatgataacggtccgcacaccctggagggcagagcgcatcgtcagcaacgacaccaggaaggtcttgccggaaccagcccggccaagcaccgtggtattgccattctccaggatccgccggtcaaagaagtccacatagatgggcgtctgtgtctgcagattgacaccaatcagggtgccggacggatgggagatctcagcattgtagaaagggaaacaggccgtcaaaccctcagatgaaaagttgcggaaattcttgggcagccaggtttttccaaacggcatgccagacttgtaaccctggtcctggcgcaggtgcaggggcatcagtttgatctttttgccccgcagcgtgttgtccagcatctgagtctccttgtccagctggtccaccgttttaccatacaggttacagatcatctggacttggaacatggagatgtagttctgctcgatcttctcacgctcacggaccagctcggagatctggttgcccaagcgggtcacatttcgggtctgccctttttcagattccacatccagctgggcttcgtactgggtgattttatcggtcagctcatcgatggcctcacgctcgtccatggggttgatgtggatggtcatatccaggtcaccatcatagttatagagcttatcggcccagccaaccatgatgtgcttggggaaaccagtcagcaggaagctgcgcatgacccggtcgccgatgcccaaatggtcgaactcagtccggtcaaagctcggcggagacatcatatccttcaaggtaggcacacccttctccagcatggtggctccggagaccttgggcttctgcacatcaccaatgatcagctccggctcctgagctacttcggcagccttgcccttctttttggacttcttttctttcttgttctttccgaaagccattacaggtcacctccatcagtaaagtacccggcatatttcatccgaatctgctccatgcgccgctgggcttccttctggaggagaatcatctcctgcatggcgccctgaccattcttatcgctgtccacattgctggcgcgcagtttgttgatggtttcgccaaggatcaggtccagcatgcccacacgaggcaaatcgcggaacctatcctcaacgccatccacgaacagagcaaacgcctcgttgctggcgatagcttcggcatagctgaagccttctcggttgtagcagctgtacacaagctcaatgagctcggcagtactcagggtacgggtgatgatcccaacggcgtccaagccactgcggacagcgttgcaccggttcagcaactccttgttggcgtaggcagccttttcaccgtccgtcagcccatccaagccaatagcttcatcatatggaacaacaatgtagcgtttcttctgctggttgttgccaatgcggacattcagattctccatgtcggccataaaatgatcggcgtagttcttcatgcccgggaactccaccagcgtcttggagatctcagtccgcagagattccacccggtgggtgttgtcgatctctttcgtctgcaggaaaatcgaaatggggaaactcaaagagttaatgaactgctggaaggacatctcgatctggtcgcgctcgccttccgtcttcaggtcatagttcagggccgagcattcgatgacagcccggtagctgtggttgggcatcacgatcatgttgttgcggatgtcgtcgaagggcaggaaatcctgggcgatctcaaggtcgctgttttcagatttatccttttgcatagggtccagtttcttgaccatcaggaaaagaccggctccgatggctccgacgatcacgagcatgatcagaatgatcagtacaggcatagctacttcttacctcctctatcagaaaatgttttcgctctccttggccttctgctcccgctcatagtcgctggcccggtccatgcgataggtcatggtgttgaccaaatgcttgctcttcttctggaatttgaatctccagatcagatactggaccagggtgagcccgcccttgttatagaaggcaaagggcagaccgattgcggctgctgggataagcccgatcatgagagccagaacaggcggcatgattttggccatgccgacaaatacaccagctccgacgatgaggcctgcagcgatccagccagcttgaccaaaggtcaaaaggccgcctacggccttttctttttcggccatgtcgttggcgatacgatatactctcgccatgtgtgggtgacacctcctttagggttcgtcccgcatgaccggctttgtttagggagatgattgggaccggtatggggctgtggtcttttacttttgaatactatgcaaatgtgctgaaagctattgccggagattggaatgtggatttgcccctgccttttgttggggacctgtggtggttgggtgtcttttctaacgaagaaagtggcagggaatttgtcttttgctctggagcatggccgcgggccggttccctcgcaggaaccgatgttggggccgtgagatatcctctcccctgctgggcatttttgggttgggcgttgcgcactacagtgaggtgggttcgttgtagtacaaaacgattagctccgcgaaacggtttcgtgcgagcagtttcggcagaatgagtcttcccgttttgcatatgagaaacaaaaatatcggagaggaatggggtccccaacttccgccatggaggctgtttcgttttgcgcggggatttcgcagtctcacggacccggcatcggttcccgtgagggaaccggcccgcagcgggccactaggcaaagagaaatttccctgccgctttctttgttaaaaaagacaaaaatccggggcccgggccgcaaaagcccaggtcccagatttcgttttttggcaacgatcagacaatctccagccccatgacagggagtccctttttcccgcagaggtctgagaaccccagcgacttaaagaagacaggctcctcttcgtcggcagggagaagaaatatccaatgggtggttccatcctctccccagcctttttcctttacagccttcgccatactggttttaacgagaaattcggttctgcccttggcgcggtgctcctgcaggatgaagacatcatcgatcaggagcccatcctccgggcggactcgcaaaacctctttcttaggcatacccagggtcccatgtacaggacagagcatgcagtagcctaccagcttgttccttgcaaacagtccgtaggggaacccttccattgagaggatctcgcccaaatattcgttctgaattctggtgctgagagactggatactgcgctcgtcctcggcagtgagctgccggacatgatattccatattatctgtctcctgcagcttggagatgtcgtcgctcgaaacaacgatatcccctccagacacccggcacatgcagttcgggtccaacagggcgaatgagacgctgccaatgagcagctcatagtcgctggcatcctttaacatcccggagacgatacctcttgaaccagtatcaagaagaacctttttgccgaccagcgcctcaggcttctgtgccagcggctccaggaccgggtaccaggcgtagcccatggacaggtttgccggcgcggcggttccgaggatccggttgaagtctccctcctgagataagaagcgcttcctggagaaaacgctccagccgtgggcgaccttctcaagatcgtccatctcatctgacatgcgcggctcgccttcctgtatggcctggatcagccggcagttataggccttgccgtcgatggtgatttggcgtccgtggacgagcccgagcgtttccagtgcgccataagagactgaatacaggaccggctcgacagcaatcagaagatcgcccacttcgaaccagtaaatttcctgcccatacaccgtatcgctaatcataactggtgcatcggccttgtagcgggagaggttcttccctacctctacaggcttgccgcggacatagggcgtgcccagggccctggtatacagcatctttgcccaaagtggtttgtctaccatttttaatcctcctttgccgtttcctccaagggcagcacaaaatcgattctggacaagtcggcaatgaccgagccgtccggcagattcagtgcaaactccctaaaattacatccaaacgatttgatcctggcgtcgcggagcatcaggtcgtagtcaccgaccgattccagctttccatggatggtcgagtcctggctcttcaccacaacatcaacgccaatcagcatgtcgatgtcaggcgggatcggccttatgggctccaataccggccgccagccaaacgatgtcagccccgaattcttggaatactgggcccgccctcttgcagagctgccgccacgcaggtcatacatgtcaggctggagcgggtcgaccgcattcatacaccagctgtagccgcaggagatgttccacagcagcgattcgtccggacaggagtccaggaaatggccccattcatcattgggagtatggttggcgccattcttcatggtacgggcccaataccgcttgccgtcaatctcgacctttttgccgaggatcagctcattgcggtccaggtcctcccaggagacgccattcaggatattcctggttgcgatcaacagcccatcgtgctccagccattcgatctcattgccgggagtactggcccccagcgttatggtcggatggtccttatagcggtagtacatccggcccggcaggactggcttgctgcggatgatcagactgccgaatttcttgatctccattatattttcctccttcgtttcatatctccaagattgcgaatctggtctgttatatgcaggctaagccagctccattctggacaaaaagaaccgggcctgcgcgactgcgcagacccgatttttcaaggttgaatctccggcctgttctggagaagctggatgcattgcacctgcccccggtcgacgaccacatggcggtcaccgatatcacaggcgaaaccattgaagccactatcttcgagccgggtatcttcaggaacaaccagttccaattcatagtcgccgacggccttcaggttgccgatgacaattccatcagggccatacaggatgaccttcttcccaagggccgtatgcgcccgtttcgggttgagtccctgcgggattagaactggtcgatagcctatgcctttgctgcggtccctcaaagacaagcccatcggcatgtcagtcccacaggaattaccgcccctgaaaagagccattcgctcatcgctcacggccgtcagagtccagcttagcgaaagctgctcttcagtaatcatcttacttccgtaggtattccagaactcggtgaactcatcgcttataaattcgccgaaccgctcgccacgaagtaaccgggcttggaacagcattccgtctatggtcacatcggcgccccagcagaggtttgcctcatccaggcggctgaagctgacatccttgagaatattgcggtcagctaccagttttccatcgtgccagagccagcagatcagctctgcgaatttgtgtgttgagtctgccaatcggatagggccgttgccagccatgtctccgggctgccgagtctgcctattcacctgaacagtacccaaaaataattccatcatagtaacacccccttggatcaactctcagaatcctgggtctgcgagatatagtccacaaggtcccggttcacaacgatagtcccatccttgattcttttagcaaaatcatcgctatccgggcccttcctgtcaaactgagcccggcggaggaccaggtcatagtcggaaatgccggtaagcattccaaccaccacagagctgttgtgcgccacggtgaccacagagccgaacatttccttgatatcgttggggccagccgaaactggctccagcaccggccgccagccaaatggttttgaccgggttttcgcagaacaggtcattggactgtgtgcattgttgccgctgcagagataccgcagccggttatcgagcgtggacgcatcgatacaccaggaccatccatcctggaagtaccagagatcctgaatgtgcccaacacacatggccgcagcctcatcccattccttaacggatggggttcgcaccttgtaccgtttgctgtcaatgacagcctcctggccggagatcagcccacgctgatccaggtcttcccaggagatcgaatgtatcaggacgcgagttgcgatgagcagatgtccgactgtcagccattcgatttcttttccaggcttggtgccaccaagctcaagtaccggggtttcccgatagcggtcaaattgccgccctgccgggacgaccggccgcttattgatatacagtgagccgaattgtttcttctccattgttttgcaatacctcctattttactctttagagttcgtggatgaagtccagttgggcacggtcgaagacaaagctgagatcatcggtctgcacagcatgccccaactccagaaccggcatcggattgatgaaatcgacgagcaggtcatagtcactaaaatcggctaattcgcccttgtagaccatgccgtcgcagccgaatgaaatcatcttgccaatgttggcccggcaaagttccatactagggcgatccaggactggccgccagccaatctgctgtgatctggtagatggcaatatccaaccttcgccgtgtgcgcagctgtatctaaacacgccgcagtagtcgtcagtactcgggtctttccctctatcctgcgaccatgaccagcaccgcttccagtgccacaggccgtcatcgtaggaggtcatgcccagaatatcatgccattcccagttgcccttcgggccagggtagtttttcaccagtctacaggtataggacttgccgtcgatggctatcttcttcccatagaccaacccctctttgttgaggcggtcccaggaaatgttgaatttgattggacggctcgataccagcaggccattcaccgagacccactccaactcctggccgggaatcgtgttgcccaggccgcagttggtttggactcgcggatgaatactcccgaatcgctcgatggtatagcttcccatgcgtttgatgcctcctttggtttgttttcccaaattgtgaatctgatctatcctatgcaggcaggccatgagctattcagcgaaaaataggcaaaaaaggacggcaggcgtcccgccgggcatcggcctttgcctttgccctggagtacgccttgccgtttgggacaacacgggaaaccgggttgaccccgttccagctgcctcgttgtgcagcgtagaaggctttctgggccttcttggattgcttgcagagatccactacctttctcatagctcgtgcctcctaaattgttgtttacaaaatggaccgcgggaaagcccgctccgtaaggggtgggatgagagcggggccagactgttagctatacagcctatggagacaggaggaccaaatggcccgactgtctcctttgcttcctgcccccgctatgcaaccaaacaaatgttttattttttggcaaaaatgcttgacatttttcagttgcagcatataatatatacatggaaacgagatataagcatcgcaacaccagtgtgtccatgatcaactaccacctggtattttgcccgcgctatcggaggaaaatcttcttgtacgatggcctggaagaccgcttcaaggaactggtctaccaaatctgcgcgcaaaacgactttgaggtactggccctggagtgcgacaaggaccactgccacctgtttgtaaatgtgccgcctaccatcagcgcggctgatgtggtacgcatcatcaaaacaaacacggcgagggtgttgctgagggaattctcggaactctccagggcacagtcggtgtggacgcggagctactttgcctctactgccggcgaggtcagctcagaaacgatcaaacagtatatagccagtcaaaagaaccacgggtaaaggaggtgtggtcgatgagccgttggaacaaagatatcgaggtcggcgagcgctgcgtcctgacgctgccgctcaactgccatcccagggacacgcggttcctcgaccaggtcttccagatcgaaaacaagctcaagaaccagctgatcgaatggtacaaaactcagctgaacgagatgacccgcacccgcctgtggcgggaggccagccaggcccttgccgacctgcacacggagtacggcccggacatgaagctccttgccgagctggatgaaaaggccaaaaagaagcctctctccaaaaccaaggaggcaaagcgcgtccagctgcggcagaaggccaaggagtttcaggctaagcagaaacctctctatgagacccgcaacggtatgatccgtaagtatgagttctcccgcggagatttcgaaaaacggatggccaaataccgccgcagctacaccgactttgtcggcagtatggttgcccagcggctggccgacgatgtatgggacatgttccagagctacctctacggcaagggtaaggcaatccgcttttctgggatcaacaagttcctcaccattgaggggaagaacaactccgctaacatcgtcttcgacaggaaggccatgaaggttttcatcgggcagggccgacacaagaccggcatccgggtcaagcgcagccgcaaggacccctgcggctacgaggccgaggccctgagccgggagatctgctactgccggatcacccgcaaggcgtaccctgagggctggcggtattttcttcagttggtgctgaagggagcgccgcccgtaaaggctaagcctgacacgggcgaactgctccacccgatgggtgagggccgcgtcggcatggacattggtcctcagacgctggcctactgcggggaggatgtcctggacctggtggagctggctcccggcgcccagaatctccaggaggagatccggcgcattaaccgggccatggaccggtcccgcagggctaccaaccctggtatgttcgacaaggctgggcagatcatccccgggaaccgcctgcccagagaactgcttgacagccacggcaaacgcaagtgggtaaagagcaaacagtaccgggagatggagcggcacaggcgatacctctaccgcaagcaggcagacctccggaaggccaagcatcagcagctggcaaacaagttgctcgctgccggcgaccgcttctatgtagaggatatgtcctggcgggcattgtccagacgctccaagcaggcccggaagaacaagaaaggtaagaacctctccaaaaagaggttcggcaagtcgatcgccaacaagtcgccgggcgcctttctctccatcctggagaagaaggtgctcgcccagggcggttccttttatcggatcaatatctggaaggccagggcctcccagttccaccatatgacaggccaatatattaagaagaagctgtcccagcgggtggacatccttgaggatggctccaaggtccagcgcgacctgtattcggccttcctgatcatgcacagcaacaaagcgctggacggttttctggtcagctcatgcaatagggactatccgaagttcctccagatgcacaacaaggcgatggcagccctcgccgccagcgataagcctctgcccagcagcatgggcgttcgccgcaaggctgcctaagatgatattttcgcccccccctgggggcaatgctccacagcatgcgaatttcccaagtaaacagtgggtggtaggacgagcgccaccccatactcagcacgccggcctctgcttcggcagaggaagcgagtcgtaggactcgcctaaggcacgcaccgagagacggcacgacagtctcatacggcggggcgcaagctctgctaggggctgtgcatcagccgcatgaagatgggtaaccatcttccgcagctgaaaagtggatgttttggcgcatacaactttcttcgggaggttgcgcagcaggcatgcatgcgtcggagggtccttctccccgcaaggggcgaacaactccctccccggtgacaccaccaaccacggacgggaagtattagagaagggcgcgtagcgtccttctctaagaaccccactccgtaaggggtgggagcagtcagatttatgctatgcgtgcgctccaaaacccattccagagcagatgctatttcacctgcaaagcgggaaaccagtcttatttaacgaagaaggctgatggggcagtttcctttgccaggagccgtggccgcgggccggttcctcatcggaaccgatgccgggtccgtgagacctccgccatagtcgcattgcgggtccacggttgccgcaaacgatggggcagcaaatggttgtctgcaacaattagcttgccacgaagcgaaaaaagacatagaaagagccccgtgtgggggctcttttgtctattagtcaatcaaaagtttgtactcggtcccgtgctccgtatggaactcgatgaccttgccgtccgcagagatgctgcaaatagccgtgaccttggaggttcggagtacccggtcgggctcgtcgttgatggtgatgacggcgcattggccgaccgccagttcgaacacgagggaccctttcatctttttcatagcaatcctcattagttcttgtctatggcccagccttcagcctgccagtcccgggaaatgactccttcgggagagatgattgcaagctctaggttctcgatgtcgccgccatcgacgacctccacgaaatagctgttgccttcgtcctccagctcccactcgcccaggtaggactcgtcgggttctgtataggtcacctggctgaagccgccgtcatttgcctttgcaaacagcacagcttcggtccaagaggactcgtcctggcagccgcagcacttaatgtccatgaacttgccgtcagggaacgagactgtatggatgatggtgttgtcctctccctggaactcgccctcccgctcggcgttcaggtagccgttaatgacggccaggcaccggctgggaatgagcagcttcgcagcatatctcattttgtctcagcctcctcctgctcatcctgcttcaagctgatccaagactcgatctcacgcagcacaaactcggtgagctcagggcccatagacccgccagggctgaccgtgccatggaactcggcgtgttcgccgctctcgggctcgcggatagagacaactgccacatgcttgtggcccttctctcctaacttaatgttcatatccagcgtaaattccatgttcttttctcctttcaacaatggttcttcccacatgactttctctgaaagtcacaattttgtggttgtacatctgcgattagacaaattgccaacctctacctcgggcaacataccgcttcgcgctattctacctggtggtggagaccaccactaagttggaatagcctcaacaattagcatcctgaagtttttcgaccatgtccagcggcaccgacacgatcagctcgggagtgagtccgtgattatagcagatcgcctctgcagcctgaagaatggtggtgatcccccactcctccggctcgtccatacgaccgccgtccaccgcctcataggtttccttgtcatagaaggtgtagtcatacccaccttcatcgcactcctgcacatgcaggtagtgctggtcgtcgaccagaaataacttttcctccatgagttgatatctccttcctatttaattattcgccaggcgaaacaacataggcattgagcgtctgcctcccgaatgcaagggcgtcctcatggttgtcgaagtaaacatccacacggttgcccttgatggcgccgccgacatcctgaacgatacgctcacccaaaccttcgatgtagagcacagtgccaaatgggtacttactcttgtcagcagcgatggtcacgccctgtaccgcttcagccccactggccgtgtagacgataccattggggcgcttgctggcccattcgccgcagcatttagcgcaggagcaataggcggtggcttcgatagtctcccactcaggatccggagtcggctcaggcgtctcaagcggaagcacttcggtctcggcctcagggatggcccgcagcgtcttctgcgagaaatggatctcgctgaccggctcgatatcgggcatcttctcagtgacagcctcgtccttcacagtagcgtggaactcggttgcggtcccgctggcagcgaaagcgatcgtgctgacagccgctacggcagtgaccaggcagaccgccatgcgcaggcggataacttcccggaggtgggacttgcggagtttctggctggtttcctggctttgagcctccttcctctttaatgtaactgtaatgattttactctccatgtagagatctctcctttgtatgtttttagcctccttcagtggatgactgacctcatagtatgcaaacaggccaggattgattttgtagggatggagccctccttttttaccgaagaaatgcggcggaggattttccccttttgccgctgggcttttgccgcgagccggctccgtgagatttctcaaaacagcaccccgccctccctaatagggagaggcggggtttggttatgcgtgcgatttcagcaaatccatgatatcctcgatgcagttggagacaacacagtcagtggtggcatatttgccatccttgcctggcctgttcagttcgcagacagcccacgacaaccatgctgcctcatgggactcctcctcatccagacgcagcatcagtacagacggaaagctctctccgacactctcctctggcggcaggaagacgcctccgatcacctcgtagtaggtctcctgatatgggacatcgccgctcagcagccaatactcgtgattcagtctggcatcaattacaccatactgtccagccagatcggccggaccaatcagcagctccggcgggatgtcatcggtatcgaactcatagacatagagaggcatccgcagcccatgttccttggccaggtacagcgcctgcgcctggcaaggcttggcgttcacacatctctcgatgcggtcggacaggcagatacggggcgtctcggcatcttccatcggcagccggcttttcggcacgcgagggatgaagaacggaactggatcgtagctcagatgatagagtttcatgttgccagccccgccttctccagcagcttctgcatctcctccgcagcgagccgcatataagccgcggcaatgatgctgctggcgtggaaagaaacgagccagtctccgctcccctgctcgatgtatgagatgttcatgtctggcagataccatcgacccagttcatccgccagctcctggctccggatattcgtccggcaagccaggacacatggcttcctgtctcgaaaatggatgatgccatagcgcccaggggcgccactctcgaaaggcaggacctccagcaggtcggcggttccgtatggagcggtcgggcccgccgtcccaaataagtattttcccatggttatttcctcctactaaaatatatttctccagcattggattctgagttgttttatgcaggttgtccgcagacaattccagagagcggattctctgttgctgaaaacagcggaacggcaaatcgttttcaacaacgacttgtcatccccacaccagcggacaggcaggtcccacggacccgacttcggttccgaaacggaaccggcccgcggccacagctcccgacaaacaaagcaaaccttcgctacatttcttcgttaaaaaagacctcaaaacatctgtacgaacaaaaagaaaggccccgcccttccctgttctgggaaaggcggggcatcgttcaatcatccaagaattccgggtagtctccgctctccttcaacatgcagacattggtatgacgccagccttcgcatacgctggagaacatacaatcatcgcggcaaaaatcatccttccggtcatcgttcgtcagcgccttcttgtgtccatagaaggggtctgtgagattctcatagcaggtgccggcctcctccaacagtgcccgcacctcgtcgccgctgagggatgcaaaatccttgatcgctcggaaatccgaatcggtggatgtgtcggtcgggtcatttgccagagcaagccgccagagaccattggggtcttccgccaggatgaacataaatttcgtttccccgaagatgtccttaatggctctgagcatagcctgagccagaatatgcagggcaaaattgcacccaaatccatccgaagtgcggatccggtctaggaattccttccggatgacgaccgcttgatagccgccatccgcatcctcatcgtcccatctccgaagcagaatgtcatcagcggggcggaactcgatcttcttctctctgcagacattgaaccggacagcccgctcaaacagtttgtcatagcggccccaggccttcagccggcagaacttggtcagctcataccccttgcattcaccgaaaaaaggacagtctgcctcgcagaatatttcctgcacctctttcatgtgctccgggccgagcagttccttgatctccgcccagcgccggcgaaagggcttgggtggtcccttgtgactcttgcgtttcttcttgctttttgccattcttagttcctccttgattttttatgggccaggcctggggcgaagatgctccaggcctgggcagacagggacatcagttgtcgctaccgtccatctcatccagcatgtccaggaactgctgggcgggacagaactcgcattggtcaggctcgcaggtcccagcggccacctgcgctctacagacagccttggtggcggcgacggcattgtcatacagagttttctccaacatgtttgtatcctcctaatttttaattttgcatccccaattggcttgcataccgctattttatgcaatttgtctgaaactcatttttgcacaaaaagaagggcgcccaccatgtggcaggcgccctgttttggttgtcagggagtcggtgttggagtctcctccgtggtcgggaacacaggcttgctgaattggtccttgacagcctgctgggcatcctggaagtacttatccaactggtcgatgtctacgattgggtccttggcattctgatctcgatactgcccatatccatcgttgatgccttgctcgatttcaggagcaaagatgctggcgaacttggacacaaagtcagttccatcgccccacatgatcgtgcagaggatcgggaccagtataaagaggccggccaaaaccaaagcaatacgggtcaggcgaaggaggatcgatacgaccagacaaagcgcaattacaacgatgaatatgatgaggagggtcctggtatccatatcttaaccctccccctcgatcagtgcgtaagccagctctgaacggcgctcatgatctgcgggcccatcgtagcggcggtgaagcagacgcaagcgatgatgagaccgatcaggcctcccaccatggtccgcttattgccgacggcgccaataatgatcaggagcaggctgatgaagaagccgatcacagagacgatgcggacgccccgggtgatgatcgaaatgagctctccgcccttgcggtccacccagttgttcacatcatcagtcgtcaccttcgggtctttgaccccaaaggcatcctcaaaggtgctgccagagttgccgctgggcgtcggatcaggaccaggctgagtgatctcagtctgggtgtttccaccgaagacggctgtgccatagcctgcgttatcggccgcgaatgcgggcacggcgagggagcaaatgcaaaggatagccgccagcaggagagaagagaaatgctgcttgattttcatagttgttgctcgggggcttcctactgccccctctcctttcttgtttgatatggtgatagtatgcacaacacacaaattctattctacaaaggcgcgcaggggcagagtgccgtccctaattcgaagaattagtgatggcgggtcttttttaacgaagaaaagtggccagagattgtctttcgccagaagctctcgcacggcccggctccgttccggagccctatgccggggccgtgagagctccgccttccctgccacagtcttaggctggctgttgtctacaacaatttgggctccgcaggtctcatggccccgacatcggttcccgcgagggaaccggctccggcaagggccttggcggagacaaaaatcctccgccacattcattcgttaagaaaaatccgaaccacccctcccctgttccggcgcaagggacaaaaaggaaccccctctgggagctctcccagagggggttccatgctctatcctacgctggtatcaatagccagtcttaggcagagtgtcgggcagcggataatagggataccgaacggaaccgccagtcactacagtggtagactgtgcagtcgcgctggtccaaccgccggcgatgccgttcataccagtgttggcagaccagctgttgccggagctcacagaactggaagcctcaccctggcagccactctcagcccggttgataagctgatagccgtttaccacattgggcaggacggagacatagagcacgggagccatagactccttcatgccggcaacggcgcggtcgaagaccatgcggatgtcggtgacatactcgccggaggccaggcccaaagcgatggaactcatgtcatagctgtaggaggacttgctgttcaggttggcagccagtacccggtagtcggacatattggtccggtactccacccggaaggtagtggcggtgccagaccaggtccccgtgtagaaggtaccggcgcgggcgccgtcagtgggcaccttgatgttcaggaagaagttctgcactgtgacgctggaagcgttgctcacattggtgtagtagaacttggcctgattgttgggagccacagtacgggggccgtgggcggtcacagtggttttgaagttgccagacttgttgtaaacggtgatcttcacatcatcgttcttgttcgtcacattgacggtcacacgctggctgttgaccatgtagcctgcgggggcctggatctgctgcacatagtaggtgccgatgcccagagccccggagtgggcctcgccgtagctgtcgccatagatggtggcaaccacgcggccggacatatcggtgatctggtacacagcgccttgcaggcgggagcccttgcggatacccatcaggacattgtcggaatcagacagagtggtgatagtcacctgtccctgctggccgccaatcttccacttcacatcggtggcctccttgagggaaatctcgatggtcttgggcaccgtatccttcacataaccggccgggacctccagcatggtggccttataccgaccagacttcaggacctgatccagatagatgtatccttcgtcattggtagtgtaggtgccaatgtagttgttgtactggtcggaaatctcaatcttgacattgtagatgcccttgtcggacgcagcgtcaacgacctggatccgaacatgagactccttctcgatgtccaactcgatgaccgtctccacattggccttcacggtgaagcggtggggctgaggatccatcacatagccctcagggccataggtgatgtagtacatatactcaccaggcttcaggtccacaaagatgtagccctggcggtcggtggtatagttgccgatcagagtaccgtcgatagtggaaatacgcagagtcacatcatccacacccaggccagtctgagattcgatgacccggattgtggcgccggactcctggtcgagcacgaaggtctccaggacctcctgattgacaggcacagttacctcgcgggcagtgcggtcgatcagatagccctcaggaacatccacgatgcttacggtgtacttgtcgggggcagcagcggcgatctggaccagaccgttggacccagtcacatactcgcccacatactttccgccagtggtccgcacctggaaggtgaccccagcaacaggattgccagccttggcatcgatagcccgcagggtcagattggcattaaccacatggtagaaagtaagtgtactgttctcatagttggtgatggtcacattctgagaggccgtgtccatctgatagccgtcagggccattggtctcgcggaccaggtacttgccaggcttcaggttggtgatggtcacgatgcccgttttatcggtggtaaccgtctgcagcagcttaccattggcctcagcaatctcgaaggtggcgccggccagaggagcctgggtgttacgatccagagcccgaatgaccaagccagagatggctttgttggtaaaccgcaggttggtggtagcatcctggctgatttcagcccactggtagctggcatccagcagatagccatcgggggcagtctcctgagcaaccatgtacctaccggcagccagaccgccgatgattacagtgccgtcagatccagtcaccacagtggtggtgtaggagccgtcgatagactccacgcggaaccgtgagccagccagaggagcaccggaggcgtcgtccaccagctcaatgatcaggctggtatgtgccttctgctcgaacacgaccgtcactggcttgctgcccagggtgatcgtcttcatagtctcaacggcagtgtagccgtcaggagtagacatctggcggatggtataacggccggaaggcaactctccggtggcgatctgtccagatgcatcggtcacaccatggaacacctggatattgtcctcattgtagatctcgaaggtggtattggccaggcccttgtgggtggtctggtccacagactcgatgacaatgccctccagcttgtagttggcaaaccgggtgttgagcacacggccagagatgacctcgattgtctgagtttctgtgcagatagaatagccggtaggagcgatgatctgcttgaccacatagaagccgggggccagagggccaacctcgaccacgccatggtcattggcggaatactcgcctaccaggtcgccatccatcttggtgacattgtactgggcgccagggatcggctgccgggtctgtgcgtcaacggtctcgatcagcagataatccttggtagaatgggcaaaacgcacataggcggcttcattgcgacacatcacaataggcacctggtaggaggtggtaagcagatacccctcaggggcagccagctctttcaccatgtagacaccaggttccatatcagtcacggttgcgacaccggccgtgtcagtggttgtctgggcgacttcctgcccggtcttgccatcatagacggcgaactgtactcccatcaggcccatgcccttactgtcagtcgcataaatggtcagaaccgacttcttagtctgggtgaaggtagcaatggaagtcttgttgttctcaacggtgattgtctggaacgcagtgttagccacatagccacaaggggcgtacagctgctcaatgatgtacttgcctggggtcagaggaccaacgacagcagtaccagtcaggtcagtggtgacctgctcgcgcacctgtccattctcgctacggacctggaactgagcgccctccaggggctccccttcagaactaagcgcctttacgataatggagctgtgccggtcaaatgcaaagttggcaacgccagccttaacagcagagacagacacagattgagcgccggtagacagcgtatagccgtcaggtacgccagtacactgaaccacataggagccgggaatcaggttgtcgaagatcgcagtgccatcagctccggcattcttagtctggagaacttgggtgttggtagcgtccataagctggtaggtagcgccgggaaccggaatgctggtgccggtgatggtaccggtggcgatgatatagggtttgctgcggttgatgaaggtaagctcctccatctggccagccacggcccggaatgttttggtcacatccgtaatcacataaccagcaggagcactggtctgctcgactacatagtagccaggatccagattgccaatcataccactaccagcggcagaactcacaatctcgccgaccttctgtccattctgatgccggatctcaaagcggcagccagacaatgggttgccctgctcgtcctgagcataaatggtcaagctggccttaacggtagccgtaaaacttcgatcaatggtctggttggcctcgatgaaaatgggcatctgggtcaaatccatggtgtagttgtcaggcacgccggtgataacagcggcatagttaccagtaggcagaggcccaaaggtcactcggccctggttatctgtagtctgaggaccggctgcgacctgattgccttgagaatagagggtgacctccaccccaggaataggcttgccagtctgtgagtccagaattgtaaaggttgcggaaccaggcttgtcggcatagaaagtacgcatcacagcactatcgtcctcggtgtttaccgtgaaagaggtactcttcagctcgccgatgtagccgtcagggacctttgtctgagtcagcacatagctgccagcttccagattaggaaccacggcaatgccagaatcatccgtgaagatctcagtccaggtctcagaggggctggtggtacgggtcagtgtaaactggcctcccttcaccggcttgccagactcagtctccaggtactggatgatcaaagaaggctttgcggagctctcaaacattagctggacatcgccttgctgttcttgggagatgtggatcttctggggattcataccagcgataaccgggtcgacattgacgggattgctggtattgtgaacggtatagtcgccaggaggaattgcgccgaagagaatggcgccgctcttatttgtagcaccctggtaaacgaccccgttgtctgtattccgtacctcaaactgggcgccctcaactggctcgccgttggcaaagcgaagtacagtcagagttacttgggggtagttaaggatgtccacagcatgattgccctcaccggtgccgaaccaacgctgctgcatgacagtgttcatcttgtacccgttgaccgcagaagtctgggtaatccggtaaaggccggactcaagattgtcccatgtcacagagccagttctgtcagtatacttgattccaaaatcatgataccgtccagaagtcacccgctccagcttgacgccagactcaggcagaaccttggtgttatcagaggaatcacgaacaaacacggtgatggaggtagtcccattatctccgggacggtcgccggatccggggttactaccaccggcggcgaagcccgcagcagggaggagcccgatgaccataacgagggcgagcatgccagagagccatttggaaaacagcttcttcatggttttgtttgaacctccttgtgtgttgccggagttaaatccggctggatttgaataggaaatttagttgcgcaggtcttacccgctggattcggacgacccatcgaaaaggaaggcgttggcatctgccgtgaacttcagctcatcggccgcccggatcaggaactccttattggagatagggctggccgtcttgcggattgcctggcggatagcccggtcgacctgatcagactttacgcccgcccgagtggccacatagtcgtagatcgcgcccgcgcggtaacgatccaccgcaccgtccaggatggcccgaataccaatcagcagaaactcataagccctgctggaatggtagatacctacctcagacaagtaatcgttgatggcccgattcgataccgtgctcaattagagacctcctttctgagccgtccatgtactgccccaggttactgcgcccagggttggtttgccttctcccatcttctgcattttgtccagtctgtggtgacgagtcacatcctggccggcagtcagggccggcagccacgcatagtaggctcgccttccaggtctcaagacggacctggaataggtgtattcgcaatcagggcttccctgccagccgaactggcacccgcatgacgccataaaaaagcagaggtcctcattgctggatgtatagtatgcacactctccaaaagctattggcgcaattttggaagtagttccggctatgtttggaatctgattctctcaccgaactaaagttcaggagcctcctgactacggttcagtgagctatctcacggaccaaacataggctccggaacgaagccggctcgtaccgcagctccctgcaaacggcgaccgcctcacggatttcttcgttagaaaagcatcctttcccctgccttaacagcaaaagaaaggggcccaggcaagatgcccaggcccctccatagggaacctatcgattagccccaaacctcgcggccgccctggctgctaaaggtatgggtattggcagcctccaggatgtcatagtaggcccagtggctgggaccgacatcgctgaaggtattgagccgcccaatattggcgttcaggaagctgggatcggcatgccgcccagtagcccggttgatgatgacgaccagctgagcgcgagtcagggtatcatcagggccgaaccgaccgtcaccatagccgttgatccagccagcggcagttgcctgggtgatgtagctggagccccagtagccgggaagtacatcagtatactgagtgttcacaggcccgttattgctgatgccgaagacgcggcaggccagctcaacgaacagagcgcgggagataggggcattggggttgaagttggtgggcgtagtcccattcagatagaacaggtatccgcgattgtaggcaatcgttacatagttgtagagccaggaggtaggcccaacatcaacgaacggatgctggatcatgcccgtcatgctgtcagcattcaggctctgcgtagcccgcaggagcatgaccagggcctcgccccgggtgacagtgcggttgggagcaaacaggccgttgccgataccggcaatgtaggcctcgtgggtcgtgccgctcaccacaggaggcgtcacaacactcccctgcacggccgtggccttcacagtcatgttggcaggtacactgtcgaaccggacgctcagagaaccatcgttcccgcgggtagtcgtgtaggtcacgccgcccagcgtgaagacggtattgaagcggttcagaacagcccgctcgctacggctgtcaaggctgaaagtcaccgtgtcgatggtatagccggagtcaggccgcacagtcacggtcacagcccggcctacatccacggaggcgctgctggtgctcaggtcaatattggcgccagtgccggcatcccgggtaatggtcttggaaccagttgtccggtcagacacagccttcacggtcatattgcccttgatgttccgcagatcgatggacactgagtcgcgtccgtcccaatcaatggagcagcgcttgccattgatggtcacgctggaggcgccgtagttggccttgtaggtcgtacccttgtaggtgatctccaggcgctggagccggttaccgtcctcagcgtagaaggaaacctcctgatcgtcgccgctgtcgacgccaatctcgccgtagcccaggtagtaggaaccgcggtcattctccagcgtcaccgtataatcgccccaggtaggattgctagtgccggcatagtcagtatcgcagtagaccttcatgtcagaacggatattattcagagtgatgctggacttcgaggaaccccaactcaagctgcagcgccggccgtccacggtcagatagctgtcgccacgcttggccgtataagtccggccatccatcgtcacctcgattttctcgattgtgtagccgctcttctcggtgaaggtaatggtcttgttgtcaccccggtcggcgtacacatagctattgctggtggttgcgccgccgtcatggtccacatcgatgcggtaatcgctccgggaaccatcatagtcagtctcacagtagacttccatatcatcccggatattgttcagtgtgatgctggactgggtagaaccccagctcatggagcagcgtcggccatccacagtcagatagctgtcgccgcgctcagcctcataggtctcgccgtccacggtcacacggattgcctcgatggtatagccactccgttccttgaaggtaatggttcggttctggccatggttcacatacacataattgctggtagtcgtggcgccgccgtcatggtccaccgtgatccggtagtcctcatcgtagtcggtggtgaaagacttaatagtcatggaactctggatgtcccgcagctccacctcaaccttgccgttcatccagttgaggtattggcgggtgccgtcaatgacgacatagtcgtcattatagtctgcggtgatcttcctgccgttcacggtgaagaccagacgctcaatgtcctcgctggagtccaatgccttgaaggtaatcgtttcagagtcgccgtcatagacgacgatctcatcccggccgccctcaatatcagagtccccgtcatgctgcagtgtgatgacatgccgggtctccttgctggccacatcaatggtgatgttgccggggaaagagtcgaaatacaagactttgctgccattgtacagcgagtcgacacggtaggcgcgaccatccagggtaaagcggtactccttgccggtaagggtcaccttatcggtggcagaactgatggtcacagaggtgatttccgtgaactccttgccggccagacgaacagtgaccggatcgccgatcttgggataggtctggttggccagattgcattccacatcggaggaagcgttgatggtcaacccagctttatcgttgcgactggtggctgtgatgatcacattggcagaaattccaggcacagagacagtggcctggccgttggatgcccaagagactgcataggtatgaccgttgacagaaacggaagcaccgccagtcgtcagggtgccggacttgccaccatcctcaataacgattgtgtcgatgacaccagccccaggagtcagaaccaccttctgggtctcgccggccgtcagcagcttagaaactacatcagtcgtcacatcgccgacagttacgacagacagctgatactggctggagcggtccgcggtcagggccgtcacatacaggttgtcagcaatgttgttggtcttcaccgtataggcatcgccgctcttactgatggtaacctgggtgctgcccacctgcaccgtcttgttctcagccgtgatgatattctgactgcccgcagcagtgcgaatattgaaggccttgatcacctggccggacttgggggtaaaggtgctgctccatgccgtattgccgcttacagtaccggtacccgtgccggaaatgtcacaggtgggcgtctggtcagagcccatattgtccttgaagccctgggggccagagttggccgtcacctggtaggagcgggcagtccgggtaatggcaatgttaaggtcatccgccagtttgttgttggtagtggacaacttcagggagcgatcgctgccttcggccagacggtagacggtaccgttagtcagcgtgccggtggcgtttacaggacgggtggtagaaacaacattgccgttcaccgacaccgagatatcaacgcctacgcccaggtcatccaccaggtcgatctcactaatctggccgccggctggatacgactcgcggaagacctgagagccgtccagggtagcggtgacccaatgggtattggtgctcgccgcaaagccgggaacagccatcgggatagccataacagcggccagggcaagagcgccgatgcgggagatgttcttcttcatcgctattttcctcctttataagaatttgttcagatctgaatttggaacctcggtttagggcattactgtcatagccctgccgcattgagatagtatgcacaatgtttgaaaatgatttgcggattccgaatatcctcgttggatgcggcctaggtcagcattgctgaacgccaggagacctggaacgccgttggttgcgagaatttgggttgcttggacttttggccgggatgtttggatacaggtcttttttaacgaagaaaagtggctgggacatttttcgtttgcctgaacccgtggccgcgggccggtttccctgcgggaacctatgccgggtccgtgatacctaaaagccgccagatagctcccgaacttcagttcggtgagagaatcagagctcgggacccacgatgcaaactcacctgttgctctaaacggatggaaaaggatatccgtttgttccaacaacggagaacggacggcttctgcggacagcaaaaaagcggcgcccccgttgctgcagaacggggacgccatgggacagatatttaagtttcagggtcggaagacggttgggcatcttcctggggagaggcatcctccgtgctatcctcgacgggggctccctcaccaacaacagggttgccattctcatccagcacgccgcctgtattgctggtcgcataaatccggtactgctcgatggtttcagtctccccaccgtcgggcgtgtagtcgaagctgactttctccaccttacattcctcaggtgagccaacgatataaatgaccgaatcgatgggaagccgcatcggctcgtcttcacccttgggctggacctcatagaacagctcattgttctcaccgaccactcggtagaatggcgactcgccctgctcgccgtcctcgtacttcagtggctccagctccttggtgaaatcctcgaccgcatctgtgatatcggcgggtgggatggatacagttggcttctggttgccctgggccgggtcttcgccctgggagttgcagccggtcatgcacagacagagaaccatgaatacggcggcgatgatggcaatgcgcttgccgaacgaaacaggtttgaacataatacagaatcctccttttgattttgggcatcactgcccaacggcctttttgattttggcgtccgcgtttgcatccagcaggcggccagtgctggcggcgatgatctctccgaccgcgcactcagctttctgagccatctgctccgcagacagcccattctccttcatgtacttccgcaaccgctccgccgggagcatactcttcttttttcgatactgctcccgggcaatctgcatgattttggtttcgacagcctcatcaaagacctcttctccacagcagccgcagatatgcgttttgtactggatgggaatgcgtacgccgtggatagtcacgacccggtcccgcaactcggaggcgcagggggtatcccggccacaataatcgcagaacatcgatcagtttcctccttcccaaaaacctggcatgttgtctccttgagcttctacatatattatatgcacttccgataatttatattttggcaaaaagaaagacgcccgttctcgggcgtctttggggtgctgtgttagccgtccaggccatccagcagcatgctgatggcggattcgaggcggcccatgtagcgggtttcctcatccagccggcgctgcgcggcctgatgatcctccgccaggacggtgatggcacgccaaatctgcgcctcagcgcggtccagctttgacagaccgatgtcctcgatggaatcacgggtcaaggtgacaaactcgccgttggcagcgagaccggtgatggtctcttcatcaaagtcagtgatgaggatacgggaacagtcctccatgccggagaattcgatgtcgtacacccaacggggcttgagagtgattcgttccatagttggcaactcctttttgttttgtttagtcccctctagcgagaagctgtacgatgatatgccagacttgcaaaaacaattctggcgatggaacttgtgcctgtcgttgggaacaacagcccctccattgttgttcgcaacaaggaagcctcacggacccggcatcggttcccgcgagggaaccggcccgcggcaatgccaactggcagaagaaaacttctccgccacatttcttcgttagaaaagacctcctccctactccttaaaatgacggccgctctaaagctctcccttttcagaattgctgtcagcgaatctgcatataactgctatagcctccaattttgggcgaatacatattattataaggagagaacaaaccatggaaaagaagaacaatgtgaaggccaccgtcgccatcgacatccgcgggttctgtgcccaatgcggcatcatcatcacggagcgcaacctggagtatccaatcacaggcgccggcactgacatggatgacggctaccacatcattctgcacaagtggctcccggaggagcagaagcgggtgaccatcgcctccatcctggccgtctgcctggtgctgaaggatcgcgccagctgtctgatgactgaatgccgggacgatgatctatccactgccgcccgccgcatgctcctgcctgcgaaactctttcaggcagagtacgaaagactggcattcctgggcaaggccctgcgtctctcggcgttgggtgtccgattcgatgtacctctgaatgaggtctgcgccagggtccaggagctgggcctggataactgaggagagtgcagtatgttttgccttacccgaagacagttcgtttggctctgcgagaatgctgtcgcagctcggagggactatgtcccgccgttcagcgccgtgtacttcgattcggagaccggaatgctgaaacggcggttcatggacggaaccgaaacccctgagatcgaccctccccactgcgagcctcctcaactgatggtcgtggccggccccaatggctccggcaaaagcaccatcagtgcagggctgcccataccagggttgtacagcaacgccgacgacatgaaacacatgctcggatgccgcgacctggaggccgctcagatggtggagaaggtccgtctcctgtctctctggaaacggaccgatttctccttcgagacggtactttccactgcccgctatctgaacctgctgcagcaggcaaaggtcgccgggtaccaaattgccgcgctgttcgtgctcacccgcgacccagagatcaatgtctcccgcgttcgagcccgggccgcagccggcggacatgatgtgcccgaggagaagatccgcagccgctaccaacggtcgctggcaaatctgccggctcttgcagaaatcgcagacctgctccgtgttgtggacaacagcggagatgcaccggaactcatttatgaggtttcggatgccggcaggcagatatttgaaaaccagcattggtccaattcggagattctgaactttgtaggctgatgctcaactaccaagcagccgcttccccaccaaggaggcggctgtttcttttgcccaaaatcatttccttctggttcgcatactatccagacagcaccacaatctggatgcaatacgaaccaaaagggggaaactatatgcagtacaagcaccttgtctgcgtaacaggacaaaacaacaacaagtactatgacatgagggagaagcccgacggcacctttgatgccacctacggccgcatcggcgctaccgccaccaccatcaactatccgatgtcaaaatgggactccaccctcaatagcaagctgaggaagggctatgaagatatgacggaattggcggtcattacagaagtcaagactcaggagaagtacaagcccatcgaggacaagagtatcgcggccctcatcgactatctgcgccaacaggcccgcgagacagtgcgacagaactatacggtcggctccgagaaggtctcccaggcgatggtgaacaaggcccagacgatcctgaataacctgtccaccgggacatggacgctccggtctttcaatgaccagctcatcgaactgttcacagtcatcccccggcgcatgggcaatgtgcgggaccacctagctgtcaagccggaggagttccccgagatcatcagccgggagcagcagttgctggatgtcatggccggccaggtctccgacaacacagtcgtgctgaaggaggtcggcgatgagagcaagacagttctggaggcctttggtctggagttctctccagccaccgatgccgacattgccgtaatcaggaaacagctgggaaaagagtgcgaaaatcttttctacaaggcctggcgggtggaaaatgccgccacccggaagaacttcaaggcattctgcaagggaaaagggcgaattgccaagaaactgttctggcatggcagccggacggagaactggtggtccatcctgcgtactggcctggtgctgcggccaaccaactcggtgatcaacggcaagatgttcggctatggcctgtactttgcgcccagggcccggaagtcggttggctacacctccctgcgcggctcctattgggccggcggccattccagctatgggttcatggccctgtatgaggtcgtgtatggcaagccctacgatgtttcggacaacgctggactttcggacatgaactacgagaagctccagaaacgggcccccggctgcagctgtcttcatgctcatgcggggcgggcgctgcggaacgatgaggtcatcgtgtatcgggaggatcagacaacgatcaagtatttggttgagttgaaggcctgatatggaaaagaaaagtggttccctgccgagacggtggggaaccgcttttttttgctggcttctgtgttgctgattctctcaccgaactaaagttcgggaggttctttgtccggcaaggtgccgaacttagccccatcccaaacttcagctgcggcaagggactacgccgcggctttcctttcatctggacagtttgttaactggccatccaggagaacctttcattgcttcacactgtagcataaccttaggatgcaagcaccccagcgggacagaggatacaggctatagcgccaccaggcatagtcttttgagtccctggggcaagcccctggcaagctctccggggagagccggccctccgaagaggtaacctggcctttgaggaactcttgggcgggaatctaccaccctctgaagtcatgaattaggatatctcccccccccatctcacgggggggggtgtaattttgtggttaggaactcagacccccatgcaactggggaatttcttaccgccggccttctgccggcggagctcggcgagcagttcgtcgtgcatgcgcttgaactccgggtaaaaacggttgcatttgtactggctgatggtaccatcggcgtttagacacttcatcaggaaagccgagtacaggtcccgctggaccttgtcgccattgctgagcgtcttttcccgctggctgagaggcgcctttttgttcgacccgtccgtgtggtcatactggctggccttaatgggctttgggtcgtacctggtgaccgtggctccgcgggccttgcccttgcgggtgagggcctctataaacatggatggggcgtggttggcgatgctcttgccgaacctctttttgctgtacggacgccccatcttcgggttgatcttagtcttcttggaccgcttggacaggccggccatagacatccgctccacattgatctggttgcccatggagaggacttcctccgcaagccgttcgtggaactgcttcagcttggcctgccgcttggcatacaaggtgcggcggagatagaaggtcttgtagtagccctgggagtagtgccactcccgccgctcacccttcttgagtcgcttgatgcggccgagcttgtcgtagttctgcggattgctggcccggcgctgccggtccagtttgcggtccagcctggcaatctcggcctcgatgtcgttcacctcgccgcccaactcccgcaggtccagcttcttgtcgtaggtgatggccaccgtggaggtgccgaggtcaatgccaacctccgcgttgggcgacatgggttttgccatggtgggtgaggtgccttccagtaccagctggaggtagtactcccagtgggtcttatgccacttggcaacgactctgcagtacttcacccggtcgctgagggcccgctgggcccatttgtcattgccccggacctggatggggatccgccggctgccccagatcaagcagcccttcttcgtgtcgtagcggatgccctgccggttggtcttaccttccagggagcggaactcctccacctttttatagtggagccgtttgcccttgccaaagaggacgctggatacgcccttccaggcctgggaggcaatcttctgcaccgtgttggcatccaggaagttgctgatctgtttgccgtgaaccttcaggtacacctggaaggcgtattcggagagcccgtactgtttccgcttagccttgaggatgtccttttccgcgtcgctgagctcgtagccctttttccgctgcttcatgcggatagcattgacctctttgtctcggtagtagctgttgaggcgtttgtttgcctcgccgaccatgatgttataggtcttgcagccaaggaacaggcagtgtccgatgaacttgccgtcgtccggcgtgcagagcagccggtactgcgcgatatagcttggcgtagtggaacgcttcatggagacaggccctcccttcactgagatttgcttctctacatatattatatgcatatctgcgctttcgtattttcagaccaggagggcaaacaaaaaactggcgggaggataccccccccgggctatttgcttttctgattgttgatgtagggtttgattacatccagcgaagcgctgccaaccgtctcgaagaatgaacctcgggcccaacgagtcggtagcctgcgcagctgagggaactcccggcgcagatggacagagctggtctgcttaatacctttcacgatggagatgggagacagccctaacgggcattccaatagcagatgtacatgatctggcatcacctccatcgccaggacaagaatatcactcttttcagcgtactcgacgatgatgcccttcagctgttcatcgacgccgtccacgagtgccttcagcacatcaggcatggctgtgccacaaatgcgtgcaggaggggtacttggccgctccgcggcccgctgcgcgtacaggtcgccattcctctcgccgaactaaagttcgggagctacctggcgattttctcggtgtagtgtttgttttgaggaggagaaaggcggttagattgggtccttggttttgcctgaggcgttttggggcgattggcgaagaggaaaggagtcttttttaacgaagaaaagtggcagagatttttgttcctgccagaggctgtggctaagggccggctccgcgccggagcctattttgggtccgtgggattggcctgtttatcgtgacggcggagatggctcgttgtagcacgaaacgacggaatctcacggaccagacataggttcccgcgagggaaccagctgaggcgagagcctaagcagccaaggggaacctcccgccacatttcttcgttaagaaagattcttatctccttgctgcttatacaaaaggcccagcacatccgcaaattactctccaaagcccaactacatggcatccatttccttccagcccttaacgaaatccgaacatttatagccggaactatccggattttgaaggggcaatagctagattttgtactgcataatatccagccatgcccaaaaagaacccacctgcaatgtagaaacccaaggcaaaacaaatcaaaggaggattgataatgagccctgatttttcttccaagttgaggcggtgcggacctttggttcttgcagggatgctgatggtaaactctcttcccatcggtgccctcgccgccaacatcagagacttcaaggatgtagacgaccactgggcgtataacgccctggactgggctgtcgaaaatggagtcatgacggggaccagcgcagacacgatgtctccagacggtctcctcacccgggcacagatggcaactatgatcgaccggctttacggcgcttacaagggcgccgacatttccgcattcacagatgtggcgatgggcagctggtactacgactacattgcgcaggcggttcaaatgggcaccatggctggctatgatggcaacatcatgcggccgaacgaccacatcacccgcgagcaggcgatcgtcgtgatcgcccgcgcactctgtctgatgatggagtacgacgaggacttgtccaaattctcggatgccggcctcgttggttcctgggcctatgccgatatatgccgtatggtagagaaggagtttgtcgccggttatccgaacggcatgctcggccccaaggacaacatcacccgcgctcagatggcccagatcctcgccaggatcttcagccatatccatgagcggggtactttgacgggcgagtacgacgacattgtactggtccgcggcgatgtggacatccgcgatgcagtgttcaatggcgaccttatcatcgctaacggccttgcggagcgggagctgaccctggaggatgttacggtcaagggcaacctggtcgtctggggtgggtccaagatccatgtggaaggccagtctgatgttgcgggagttgtcacgccccgtaacgacggggatgtgcaggtcatcttcgacgagagggcgaccgagatctcaaaaaaggactgccaggtcacctaccccggttcgatgaaccccgacaacgaggtcatctggacgaacaagaaacccacgacccccagcaggcctaccggaggcggcggtggaggcggcggcagccggcccatcgttgtcaagcagcccgacattgagtttaccctccccagcgtcctctatgtcggcgataccaccactgtgaagacgatcctgaccaacacggactcagtggaatggtctctgaccctgaatgggacggccaaggagctgactggcttcaccaaggatggcggcgagctgtccttcctggagtccggcacctatgtcctcaagggtgtggccaaaaatgggagcaacacggacacctgcgagcagactgtcaaggtcatcccggtggccaaccttggtttctccctcccccaatacgcccacactgattcgacgactccggtgaaactgctgtttgagaacggcgagggcggaaatgtcagctggagcatgacaaaggacgatcagccctatgagatgccggacggcttcaacaatgagggcggctctctggtccttcccgaaactgggacctacaccctgactgcctcctatacggatgcagccgggaaggtctataaggagacccagacgatcaccattctgccggtcatctccttggacatcagcattgatccaggcgagacacacatcgatgtggccgccactgtcaccgccaatgatgcaggcctgcctgtccagtggacgctgtcccagggcggcagtgagctggtttgggactcggtgacagacagccagcttggcgccaccggcggcgagctgttgatccccacggttggccagtaccagctgcaggcatcggtccccgatgcttccggccgcgtcttcacctccaatgtggagtcgatcaccatcgagggcctgctggagccctgcctgactgtttctcagtacggctggaccgaccgggcgttcctcgtggagatgactggctacgactcctaccctgtctcctgggaagtgaccaatgagcagggcgccgttgcctatcgggggaacctgagcgatgacggcggcaacatccagattgacacccccggcgtctacaatatccaggcaacggtgactgaccggctgggccgggagttcactgagcaggcctccgtcgaggtcctgcctgtcatcgagctcaccgcttcggctgacaaggccggcctgcacctggacgaaaaactggccctgaacttggataccaggaacaccgccgaagaccagaccatcacctgggaagtcaagaaggatggggtcgtgtacgaaggcctcgacctgtcgaacctcccggagatcagcttcaccgaaaagggtgcgtactccttcattgccaagactgccgacaaggctggccgtgagtatgagtccgaggaagtctcggtccgcgttatcgaggacctggacctcatactctcggcggaccggatcgacgagccggacgcagaactgctgacggcggacgcccttaccgaaatgaccaagctccacgaggacgaggatgccaagatcaccctgacggttgggaatggcttcccggccagcgtctcctggaaactggagcgcgatggagttgaaatcccggtcacgctcaacgatgatggcggcgagcttgatttcgatgagctgggcgacggcgactacacgctgactgccacggtggccgatgaattgggccgcgagtacacggagagtgtctccctcaaggtctacccggtcattgacctgagcatcgatgctcctgagaacatccactttgaccaggctgcgacgatcggcctggatgcgcctgacctgggcggcctgacggtgaagtggtccgtgatgtcggagacgggtgcggaggttcccaatacgctcggcaatgacggcggcgccctgaacttcatcgaacccggcacccatttcatttccgcttctgtgacggatgagcttggacgcgagttcttcaccgggaccagtatcctggtctggaatacagtccagctgtccttcaagctgcctgagttctcccacccggatgagacggtcgtggtcaagatgacctctgaaaatctgcgtgagaaccagatcgtctggtccctgactgtggatggggagcctgtctccctggccgacggcgtggacgggtctctgaccaatgacggcggcagcgtcaagttcaccaagcctggcgccaatgtcctcacggctaccgtgaccgacgagctgggccgcaccttcacctacgaccagaccattcaggtgtatccggtccagactctggacctgaacgccacagcggccgtccatacggacgaatacgccgaagtcaccctgagtgccaacacggacctgcctgtcacctggaaggtcacgccctccaacgacccggatacagctaccagttatactggaagcctgaccggcagcggagggtccatccagatcgaccatgccggcgtctatgacatcacggcctccgtgaaggacgccaccggtcgcgtgttcacctctgcgaccaggtctgtcaaggtctatccgattgccggcctgagtttcacgctcccggcgactgcctggacagactctggtatccctgtggacctgctgtcctccgatctggcggatcagaatgtcacctggactctgtccaaggatggcgtccccgctgagatgaaggactatgtgtttggctccctgaacaacaagggcggcaatatccggtttacggatgtcggcgcctacacgctgactgccacggctgaagatgagctgggccgcgagtacagctgctctcagacggtgcagatctacccggtaatcggcctgacggtcaccacagaggccgccggccacacggacgaggctctggatgtcactctggacaaggccaactgggacgggcagaatatctattggactgtcctgaaggatggcaaggaagtggcgcccaagtttgagctgggagccggcggcggccatgggttcgtcactgaaccgggcctctacaccttcatcgcaaagaccactgacgagctgggccgcgagacgaccgcctcccgcagcatccaggtctacccggtaggacaggcgggcttctacctgcctgccgcgttccacacggacactgaggtcgacctgaccactgatttcagggaactgggcagcaacgcgctgtactggacgctgacccgcaacggtgaggttgtccagccctccacggtgatgtccggcgatctgagcgccgagggcggcaagctccagttccggcagacgggcgactataagctgaaggccgtcttcacggacggcggcggccgagtctactcctacgagcaggaattcaccatctacccgatcccgcaggtcagttggacgcttcccagctacgcccatacggacactgagttctcggtgcccgtgaaatcctccaatgtctccggcattgagggcacaaccatcaactggttcatcgctgacacctacggcgtgcggcaggcctggaacacctatgtggccggcagcctgaccgccgagcctggcgacatccgcatcaagcatgccggcacctatacgatcggctgcgaggtcacggacgccaccggccgggtgttctccttcgatggacccagcattgaagtcctggctgagcaggagctcagcgtggccatcaccgagacagaggtctatgtgggccacgaggctgaagtcctgacgcttggcaacaacaatacgctccccatccactggtccctgaagaaggatggacagagtgtggacattgaccggtatgtcaccggcgatttgaacaactacggcggatgcatccagttcacagaagccggtacctacgagctgatcgggacgatgacggacggccttggccgccagttcagcgcctccgatacgatccgggtactgcctgtgggcggcctgtccttcagcatctctggtatggagtatgtgggcaacgaggtccctgtcatcatggactctctggtcaatcccaccggcgccaatatccagtggtctgtggaaaaggacggcgctacctacgccatggacctgtccgggttgaacaacgacggcggcaaggtcgtattccccgaggttggcagctacaccctgatcgccactctggacgatggaagcgggacgccctctgtggccaagcagaacatccaggtcatctacaaggctgacctgtccgtgaacgctccctcccagatccatgtggggcagcccttcgatgtaagcctctccggcagcggcaccctgaatgtgaagtggggtgtgaagatgggcaatgtgcccgtcgagctggacggcaacactggttctctgaccggcaccgctggccagctgaccctgttcaaggttggtacctacacgatcacggccactacggtcgatgatgccggcaacccgcatacggcgtttgccaccgtagatgtgaccaatatggcgcctcagatcgactcctttaccgcagaggccacccgcaatgttgtgggcgaccgctactacgcagacctgaacgccacctgctctgacccggatggcgatgaagtccatctggagtgggatgacgagtaccaggaggatggctactactccatcggcactcatacgatccgtgtgagggccgtggacgagtggggtgccgcctctgagtgggtctcccgggaaattgaattcatcaacgacccgcccgtcatcacctccttcacggtcgagccgacccggcagctccagaacggcaagtttgtcggcaatgtctccgccaaggccactgacccggacggcgacagcgtgaccctggagtgggacggcgactaccgcagcgacggcctctacgagcgcggcagggtccaccggatccgcgtccgggctgtcgacgagtatggcgcagcctccgagtggagcgagaagaccatggagtttgtgaaccaggctccctccgctcctgtgatccagaagacgccatccgacggcgttgtccggcccagccagacggtgaccatcaccgcctccgctaccgaccccgagggcgacaatattcactacgagtgggaaggtcggaaggcagagtcctctacttacgattacggcaagcacctgatcaagtgccgggccgtcgacgagttcggcgccgcctccaagtggtcggccatcgtcttctttgttgccgacaatactggcggcggcatggagctgactgacgcaaactcctacctggaggagcccggtatcagcttcaccgatgatggcgagaccatctatggctacatcaccaagtattccttcaatgttcccgcagtgagcggccatagcggcaacgactggggtaaggtcgaagcctacaatatcctcactaaacagtgggatcaggttgcgtacaaagaggtcagcaatggcgtgaacctctccggtacgcttcccagcggcacctacacccaaatgcggttccattactacaccaaccacaattgtatgtacggcaagagcaatatcacctacacggtcgagtatgagttctaattcagaacccaatacttgacggctcaggctggcaacagctggcagcgggagcaggaaacatctcctctcccctgtcggcgccgccggccgttttagaaaggaagtgtttcaccttggcaaatgatcctatcaagcgtggggtcagcgtactgctggcaggcgccatgatggctgggatgctcccggccacggtccttgccgatgcgcctgatacccacaactaccaggcaactgtctacaaaaaccaggtacccggccaggacgagctgatggggccggacgaagatctgaacatctatgtcagcatcgatatgtccggcggggatgagcagatctactctgtgcatacctgctctgacccgcatgtgaacgacccctacatcacccctgccactcaggaaaacaatggactgatctcctatatctgcagccactgcaacgcctcggctgaggtagagatccccaggctggacgaggacgctcttgttcctgacggcggcaccggtctccaggctaatggctccgaatgggagcgctggcttggctcagatccctttccctccgctgtccaggatggcaataatgtagtccagatccagaaccggctgttcaacgccgatatcgacatgggcgccgttgagccctccaatatcgccatgctggccagcgatgccgacggcgcggctgtgctggcggccggcagtgaggtcgatgatgaccctgagcagtggccggctgcggccacccagggcgttgtgtacaacacaactcccggcaaggagaaactccatctctttgtcgactttgagcaccctgatgccgagggagctaccatcaaggcggctcacagatgcgagcagggcgcctctctcatcaacgagtccaaaaaggccaccgcaaccgaagatggttacatcaagtaccgctgcgacaagtgcggctcgacagccgagctgaaagtccccaagctgacgctggatgccttcactctggccgatgagtccaggaatgacatccagaacggcgttgtctacaacggcgaggaatataccatagtctatgaggtcgcccagggttcccgccggtttgttggaacaaacctggacaacaatgtccggatcaccgaccccggcacctacaatgtgatcatcaccatcaataatgcctgctatgacaatgtcgagctgcgcggcaccgaccagcttaccgttcgtcccaagccggtgccccctcctgggactgacttcttccagaataaaatctatgatggtacaagcctgctggccggcaagtcgttcacctatcaggatgtgaagggccagcagatcacggtccctatgaccgttcatgccgtggccatgaagggcaggaccccggaagcagacgagtcgactcagctgtctgatcctaccacagccggcgcctacgctgtgacctttaccatcacagaccccagatactgctgggatgtggatgacgacaccgacaatatttattctcggtacacgctcatctgccacatcctccccaagactgatgccgtctttgtcaacgacaaagagtcggacatcaagctgctcaatgcagaatctgacctgtacaccttcactgtgtatcctggccaggccagctttgattccagcaaggccggcaaaaccaagactacggtcctgatcagccgcaaggataacagctggaacggcgtcagcctgtcggtctccggcctcgatgtcgaggttaagagccgtcagatcctcaccgtcaaggacaatccggtcatcaacaaaccagtcggcaccccatatgccgagctgggcctgcccgccaccgtcactatcgacgccgagggcaccggcggctatgaggccactgtgccggtgacctgggacagcggcagctacaatgaccagtctgtcacccagaccctcacgggcactttggacctgagccatcacccggaactgaacaacagcggcagtgtagtggcgcaggcgcagattaacctctccaagggctctgccaccgctcccagtttcaccgcgttcagcaaggtctacgatggcaatgccaccccattcgctctgcccaacgctacagagggcattcagtccatgtctgtgcgctatacgggcgacgatttgaataacagcaagtatcaatccaacacgcctccggtgaatgccggtacctacacggccattgtcgagtttaccatggtgcccggctttgagcagcttaccccttctcgggtcagctacatcatcacacaggcgtcccgcacctgccccgctcccaccatgcagtcctgcacgacgaccagcatcaccctgaatacggtcgagggcgccgaatacagtcgggacggcctcatctggcaggagagccccatgtttgagcacctggaccctggcaccgagtacaccttctaccagaagctgctggagtccgaggacaagaactacgcggagactgaaccttcctctgccaagttcttcaccgagcagcagcaggccggctccattgatctgcagcctcagtcggctgactatacgggcagcccgatcccttaccgcgtggcccccatctccggggtcgtgaagagcacgatccaatactatgtgtacgaccagtggacggccgctgctcccaccaatgccggcgtctaccaggtgaaggtcaccttcgagatgaattccggctatgctcctattgagccggtcgatacgactctgaccatcaacaaggccaagcggcaggccccacccgtccccacggccagcaatgttggcaccaacagcatctcgatcaccactatcccgggcgttgtctatgccattgagggcatcaacagcggcgcatatcagcccagcactctgtttgaggggcttactcccaacactgagtacacaatcaaggtaaaataccccgccgacgataaccacgaggagagccctgaatcctccgccactgtccgaacggccaatcagactaccaccgccgatacagtccagtccgcagtttacacctacgatgggaccggcaagcgtctggttgccaatcagccggccggctgcaccgaagtggtccagaccttcaccggcatcaacgataccgtgtacggtcccagcactgaggcccccaccgatcctggtacatacaaggtggccgtcacctataagatggatgccggctacgaccagatccagcctcagtacgctaacctcacgatcaacaaggctgaacaggccgcgcctctggcccctgtggtgaatgccgtgactgactccagcatcaccatcaacacgactgagggtgtgagctacagcattgacggtggccgccactggcagacgaccggcgttttcaccggcctgaaccgcgatactgtatacagcatcatccccaaggccgtggagaccaagttctacaaggagcagactggcccggctaccgagcagcggactgaaaagaccactgtccggttccctgagattgctgaccagacatatgagtttgacggcacggccaagaccttcacgctgcccaagtcgatcaccggcatttctgccatgcagattaccggatacggcagcctcagctctgctccctctgctcccggagactacaaggtggccattgcgttcaccccttccgacggctatcagctgcccgaggagcggccctctcccaccctacacatcatccagaatagcaagcctctagctcctgtcctgaaggatgagtcgactacctacaatgggcaggcccaggcctaccatggcgccgacaatatccccggcatcacctctgtgaccatcacctatgttggcgaagactatgggccctccatgacccctcccaccaatgcgggagagtatgaggtgacggctgactttaccgccgaagatggttacacggttgcccacggcccctacacggccaagctgatcatcaagaaagccccccaggaagcccctgtggcctccctggagaaagccgaagccacctccctgactgcctccgccatccctggcgccgagtacagcatcaatggcggcatcgactggcaggacagtaatgtctttgaggggctgaacccctgcaccagctatacgatcctggtgcgcatgaagggcgacgacaaccatgagcagtctgcctccaggcctgtcgtcggctccaccagcaagcatcaggtggacatccctgaaatgcaggactacattaccacctacactggcatcggccagccctatccgtacaccagcaccctggctaaactggacggtgttaagtctgtgagcgtgatgtacttcggtacccttaccaacagctccccctactccagcgccgaggcacctgtgaacgccggctcctacacggtccgcttctacctgaccccggagaccaactatgagctggactctgatacagctgaagcgcacatgaccatcgagcgggcggcgcagaccctcgaagttgtccccagcattgccaaccgcaccacgaccactatcgcggtcaacccagtcccaggcgctgaatacagcattgacggcggcctgtattggcagtctgcgcccaagttctctggcctgaccccggacaccacctatacggtgaccatgcgcctggccgagaccgacaactataaggcgtccaatgagacctctgccaagacccgcaccattgcggatactggcctcgactatgagatcaactacaaggacgagaccatccacttcaacggcgaggttgtccaggccggcaacgactattctatgaccgacaagctggacgagggttcttctgtgaagcctggcagcaccatctatgtagggctcattgacgacggcaccggcaagcctggcgctgtcactattgagactttgccagagcggcctgtcgcccccaatgtcaccgtcaacccctacgactacaccatgaacaccacagatgccatggagtactccgcagacaacggcgacacctggaatccatgcaccaaggacatgaatgtggaggccctccaggaccaggacatcctggtccgcatcgaggctatcgaagactcctccttccacagcgactccagcacagtccatgtgcccattcgcggcgaggctcctgtaatcgcggtcgacaatgaaaccgagactatggacagcactgccgccatggagtattttgatggcgagagctggatcccctgccaggacaatatgtccgtttccaacctggttggggaaaacatccaggtccggtacagctgcgatggcgccaagccggccagcaatcccgcagatgtggccattcccacccgcaacattctgcccaatttcagcttcgatatggatgccgagacactggatgccgattcggccctaggccaggtcatggaaagcgaatcctggacagatgtaggcgatggctatgatgtttccgataagtgcggccagggcctgacagtccgggccaagcacgacgccgggcattttgccagcctgcccgagacggttacagttcctctccgcgaggcggctcccagctgggctatcgacaaagagaaagtccaggtcaccgggctgaccaacgccgagtattccaccaacgacggcgagagctggaccaaggtcgagggctgcgccctggatgtctccagcatggccggacagacgatcatcgtccgcaccgcccatacggggatcaccttcgccagcgaccctgcgagcgtcgagattttcggttatgccgagaggcctaatgtcaagctcgacatggacgatgagaccatcaataccactaccagcatggacatttcctctgacagcaaaaactggactcaggccaccgagcctctggatgtatccagccagactgggaccaccatctatatccgcgagcacagcgatgacaatgagttccccagcgatccggtcaccattgtgatccctggccgccggcccaagcccgaggtcgagatcaacaaccacgatgaaaccatcaacacaaccaccgagatggagtactccaccgacggcggcgagacctggacgcaggccaccgagcctctgaaggtttccgaccactccggcgagacgatcctgatccggttgccctccaccgaggatgagtttgccagcgccgagacgaccatcatcgtccctgcgcggcctgacggtccagttgtggagctggacaccgagaagcagaccatcaacaccaccgaggacatggaatattccaccgacggcggcgagacctggaacccggcgaccgaaccactggatgtgtctgaactggacggcagggatatcatcatccgctatccgtctgaggacgataagccggccagcagtgaagtgacggtgacgatccctgagaagagacctgctcctgatgtcactctggatcccaaccccggcatcatctccccctccaaggacttggagtacagcgatgacgacggcgaaacttggaaaccttgccctgaccccttcgatgtttcggacatgggcggcaaggacatcctcatccgcgaaccggccaccggtactgagctgcccggtgagaaaacgaccgtccacatcccggaaaagtacccgacccccagcgtgaccctggacactgacaaggaaactatcgacaccaccggtgacatggagtattccactgacggcggcaagacctgggatccggcgactgaacccatggatatttccggcatgaccggacaggacatcatcatccgcattcccggcgatgaggaccacctgggcagcgaccatcagaccatccacattcccaaccgtcctgcggctcccactgtgggccacacggacgagagtgtgcgtggccggaacgatggttccctgaccaacaccaccactgatatggaataccgcgtctccggcggcgagtggaccaagatcgagggaacctctgtcactggtctggctcccaacacctatgaggtccggtacagccacactgagagtaatatggccagccttgcccagacggtaaccatcgctcagggccgcgtgcccagcagcggcggcggtggtggaggcggcagcaacagctcctcctacgactacacggtccggttcgacagcaacggcggctcctctgtggcttccaagcatgttgaccgtaacgaaaaggtccgcgagcccaaggagcctacccggaagggctatgtatttgtgggttggtacaccgacaaggctctgaagaacgagtatgatttctctgaacccgtgaagaagagctttaccctctatgccaagtgggagaaggaggccatcgaacagcctgtgaagcctgttccccccgtccagaacgacaagtcctggatgctgaacaaggaggaccacatcgcgtatatcgccggccggactgctgataaggcggctcccatggccaacatcacccgcggtgaggtcgccatgatcatttaccgtctgctgtccgatgaggccaagctccagtttgagaccagcgcctgctccttcaaggatgtggcgcccgacgcctggaaccgcacggccatcgccacgctggccaacgccggcatcctgactggctacgacaacggcaagtttggtccaaacgaccatatcacccgcgcacagctggcgaccatcctggctcgcttctgcgatgccaaggcggccactggcggcgatcagttcaccgacatcgccaaccactgggcccgccagtacatcaatacggccgctgcggctgggctggtgcagggctatgggaatggtgtgttcgggccagacaacaagatcacccgcgccgagacggtcgtgatgatcaaccggatcctgggccgcaaggcctctgccgagtctgtcgtccctggctataaggtattctccgatgtcgatacaaaggcctggtacttctgggactttgttgaggcagccaattggcatgacttcacggacaacggcgggacagaacagtggactaagctcgactaagcacttataacacctgcaaagacgggtcgccattcctggcggcccgtctccttttgctattgtgaggttgggggcgggcgtttttcagcaaagacagcagcatcttttttaacgaagaaaagcagggggattccttccttgccagatgccctgccgcgggtcggttccttcaggaacctatgtggggtccgtgagacctgcctgcggctttctttgaaagccgtgtggtgaccttcgaagaaggtcatgtggtggttttttttgaatgccatgtggttttccgctacggcggaggtagttggctgtagcgcaaaacacgagagcctcacggaccggtgttgggtctctccgaaaacccgcacaggttcctataggaggaaccgatcctgacggggtacccgaacagcaaaagaaatcctcccgttgaggcttttcgctaaaaagatccctgcatgggggccagagaaaacctatattcccctagcacaaaacaacggaacctcacggacccgacataggttcccgagagggaaccggctgaggcaagagcttaaacagccaaggggaaccaccatgccacatttcttcgctaagaaagacgggtcactctcctctgcaaccttctccctgaaccgcagcccacataggctccctacagggagcctacaggaagctccaaaactttagttcggtgagagaatcagccaaaactctcctccgcgctctaaatgagtttcgatagcttcgcatactatcgttttatccaacattttagagaaaacaaagtaaaaggagagagcataggatggctaacatcattcgactcggcagtctctatctgaacgactgccctgcagaaataggactagcgtacaagcccggcaaaaccatcagcattggagaaactgctcccggcaaggagatccactgggtagtggtaaacgatatgctgatcgccgaccgctgcatccttaccgaggtcagctgggatgacctgaatgcccaaaacctggtgttcggcaaagaggttactatcagcgggttccgcttcacggcgaggctgatccaggttggagccgaggaaggggctccgaacgaatgggattccgccctcgatgccgttggagaagacaactccctctggcattgggaagatatgtttttctggggacaggaggccgcaacggggacagcgtcttctcgtgcgtaccgtgggtacacttcggcccgcaccttctattgtacttcgtcgtcccgccgcagtgtgtccctcggttttcgccctgccttggtccctctgccctccgacaccctgtggccttcttcgaaggccatgtggtggctttcggagaaagtcatgtgggacgacgcccgcctcgatgaaaagctgtggctttctaagaagaaagccatgtggatgctctggggaggccagaatatcatcttcggccgcctggaggagctcactgactatgaggtgatcctctctgaccatggaggcgcgatgtccgatggcttcggcagccggctcagcgatgggggtctcgtcattgatcgagcctccatctctggcgtgcagaaaatccaatagcgcaccaaagcgggaccgggaggtattctcctggccccgctcttctttgtacatatccaggctggtctgacaggctcactccggatgaacagggccgccctctcaactttgagaaggcggccctgttttggtattggatcagatagcaaaacgattcattacgacagccatctgtgcgcgtgtggaagtagctttcagggaaagagtggtattgctgctcccgttgatgatgcccatcccaatagcccatctcacagcgttctgtgcataggagctcacgagcgcccaatcagtaaactgagagatgtcaatgctggacaggtccagctgaggggccttgctgctccagatggcataccgatacagcatggtcaccatctgttcgcggctcagcgggtcgctcggaccgagcacgcctccgccatagccagaagcgataccgttggcattggcccacagaaccgcatcatggaagtaagcattctcgggtacatctttgaagctgccagagccattggcaggagatccagcggcccgatacaggacagtgaccaactgagcccgagtgatgaccccgtccgggttgaacacattgtttccaacaccggccatcagaccctgggctgcaacctgacggatggcggcctctgcccagtgaccaaccggcacatcggcgaacacaggcgtggtgcttacagggggcgtcaccacaggaggcttctcctctggccgctcctgaatggcaaaatgagaaaggccaccgaccccgcgaatggtcacggagggcttcttgaataccacatcgtccatccactcagtttcattatcgccgatgatatggaggacatcagggttcttgaatttatctatgccgccgtaagaccccctgctttagctgcggggatataaggcggcatccgtgtttgtgacctcacgcagggaggtcgttcgctctcagggctaatgtagacctacaatatgtagggtggcatggttcaacctaaatggattgtccgccgttcaccacacatctaaagaagggagtctgtgaccttctccgaaggtcatgtggcgcggcgacatagatcaaccccaccccttgcacaacctgcccttccctattataatatttttattcgaaatgcctgccggagggagcaatattagatcgcggaaaaggggaatagatattatggaagccatctattatgttattgatcacctaaactatcttgtatttccagctatattctttattatacgccgcatcagcctaaaatgccaagaacccatgaaacgacttgaatccatctggctgcttttttcaggaattgtttacgggattagttggagcaaggcggctgttaaaggcttcggttatggacttgtaataagtaatataggaaatgtactggttgtaagtctgttttattcatttctcgcttttttgtttggtcttgccgatttgcttgaaacgcaaaagatccttgatcgtgaatttcgggaagagactcgcactaaatgtgccaaggcagctctacacagtatatatgtaatcgacatacttatctgtattttcgatattgcatatggcataatacgccattatgaaggagtatatcatgggcttgcttttgaccatggaatttggggatggcccttggttttagtctatattgttctggccgccgcagtttatattgggactccgacctgttgctatatgatgttgtacaccatccctataggtattagtaatgaactcacaaatgctttcaaaaaaatcgaggacaataacagggagtttgataaggcattgagacaggaatttttagacatgcttcaacggcaatatgggattcctgcgtctatagttcaaataatacagcgtggctatacgccctataatataaaaatacttgcaatggatcagtcttttagttttgcctaccaaaaggactatacggaactaatacgctacaatactcctgctcagatggttgcaaacgaagaccgtcctcgcataatattggaacatatagcagaacttatgggatatacaaacaagacggaagatgagcttcattcagcagaatggctccttatgaggataagcgaaaccggaaaagcctatcagccggacggtccatgtgcaacggccatccatgccgtagaactaaaatggccaccccaacgattccagaaattgaaggactttttccaggcacgcagcagagaaattcaagaaattgcacaaacacagctcaagtactacgccaatgattataaaggcattcgtgcaggagttgatggcgaaaaagaagttcgcacagcgctggacgatttgggtggatggattattcctttatacaatctacttctggaatttatgggcccagatggatcatataccactgtagagatcgatgccctagttttggcccctaacggcatttatgccctagaagtaaagaattttggatcctataaaagcgattatgagatcattgttgccagagatgggagttggtacaaagaatatgattattggacggaaaataaaggctcccccaagagagagccaatggacaatccttttcgacagaatgcccgccatacatcttacatagaaaagttcgtcaaccaatacctgggccgcaccagatcaaactggatatttgtggaaggtatcgttgttctggccaacgacaaggtgtctgtaagagtggaattcggtgcgccccagtcacccactcgaattggtaccctttgtaaccgcttgaggcagaataaagagaccgtgctttccgaggatgagattcaacgattggcaaatgcatttatttcccgtaatctcccatctcatgagtatccgttgtatgatcatcgtgatgagatttttcagttgagcaaaacatgtgaatcgatgctggaaatggccacgaacatcaaccagggaatcgaagcctgtctgaaagatcatccagaattcgaaaaacttgtataaagtgtgggtatatttccctgaatccaattaccagactggcgatgcccctattttgagacaagagaacgaaatagggctgttcatccactctggaattgtttccggtcttcggaggctgtttctttttgttgctggggccggaggcaggtctttattaacgaagaaaagtggcgcatggatccctttcttgccagaggctttttgccgcgggccggcccccttccggagcctattttgggtccgtgagacctgccggcggctttctttgaaagccatgtggtttcccgcaacggcagagacagctgtaggttttcgaagaaaacctatgtgggctgtagtataaaaagaccccgcgcaggtttccgcgaggaaaccagttgcggcgggtgcccaaacagcatggaaaaacctccccgccggcggaacagccttctcccctgccatcgccaatctgccattggaaacagcagcctctctcataaagaaaaagcaacccccagactgaccatcacagccagcctgggggctaatgttcttcaattaagcgggttcctcggcgtcctgcacaggctcatccgcaggaacctccgccaccttgaaataggcgtcggtcaccagcttgtacagagcctcataaggcgccgcccggaaccggaagtacctggccggccgcttgccgccctgcagcgcataagtcggcagctggacgacataggcgggaggatcggtggccttgatgacggcgatccggttgagccggagctcgccatcaacggtcacagagaccatggccttcaccgggatgtggttgtcggggaacttgtgcagcttcagccggctgaacgccgggatgcggaactcctccaccgtctcaaagaccttggtgtagtcgttgacctgggcttccacggcctcggccagcgtctcctccacggccttgtgcatgacagcccggaactccgggttacaggggttgaaggggttcatgttcatcccactcttggtatgcacgaccggcatccgcagctggctgccctcatccccttcacggggcttcagcagatgcatattgaccacccggatgccgttgtcgaacagcagctcggcggtcgccaggaccacagaacgacggtccttggggcggatgactctacactcaacgattttcatagaaaacatatctccttttcatgtccggcctcatgccggggccccttcgcggggccccagccgcaggttccggttgttgcagtaaaccgggaaacttaatacccggtcttgggcagagtgctgggcagctttccgccgccgttgttgttcaccacattggtggtgcagagggccgactcagtcttccaatagccgttgtactggccgccgcactcggagcgcatcatgatgatgtacccattgggcacagccggcatcacatagccgtagaagacaggggcgctggtcaccttgaaaccggcgggcacggtgccaaactcaaaccgcacatcggtaacatattctccgctctggacatccagggccagggaggacaggtcgtactggtaggagctggccgagctgaggccggtggccatgggccggtagtcgttcatgttggtcttgtagctgatgttgtaggcaacatcagaggaccacttgccggtgaacagggtcccgccgcggacggcgtccgtggggatcgtgatgttgaggaagaagttgtccaggcggtcgccggagtcattgttggccgccttgaacaggtacttggagaaggaccctgcgctggcgttggcgttgccggccaccgtgtgggtcaccttcaggttcatgggcgcggcctgatactcgacccgtaccacatcattgttgattttgatgtacacctcagtctccttgccggacaggccgaagtaaggagcgggcgtcttctcgcggatgatgtagcgtccgatgggcaggccgggcgaggcggcgacgccgtaggagtcagtctcgatggtagccagcaccacataggagaatgggtcgtagatctcgaacacggcgccgggcaggttgctgccggcagccaggtccaaagtcgcgttataagccgtggaggtcagatgcacctgaatctggcccgcctggttgtagagcttccacacgacctcggcagtctgcccgttgagcacctcaatagtcttggggactgtgtccaccgtatagccgttggggaccgagatcatggtcagcgtgtaggtcccatccaccagggcgccacgcagggtaatgcagccctcgttgttggtggtgtactcgtcgacgatcttgccggagccgtccttgaggaccagcttgaccccgtagataggagaaccggaggtcccgtcgaccaccttcacgcgcatgccggagagctgggtcaggacaaagtccacgatggtgggctgatcggccttgacctccacattgcgcttggcgcacagggcgtagttctcatagcccttgggcaggcgggtctgctcgatgacataccagccgggcgcaaggtccacataggccaggccagccttgtcggaagtgtaggcgccaacgacggagccatccagcttggtgaccttgtactccacgccgggcaccatggcgcccgtctggctcacagaggtccggatctggacgccgtaggtcttgccaaactggaaccggacctgggcggtgccgtcgctggtgatctccacattctggctctggttgacctcggagagcgtatagccgtccggggccctggtgaccgtcaccacataccagccggcgtccaggccgggcacacggatgatgcccgcggcatcggtggtgtaggtcccgactttggtcccctcaatggtggtcacttccacccgcataccggcaaggcccttctcagcggcgtccacgccgtagatgttcagggtgccgccggcgttgaataccagccggacattgaccgccacgccattctggatctgcacggtggtctcggtcacattgggagtgtagccgtccgggctcttgatgaccttgatgacatagtagccggaggtcagcttgtcggtctggacgatgccggtgttatcggtggtccaggtgttgatcagctcaccgttctgacggtagatctcaatcgtcgcaccagccagaggtttattggattggtcaacggcattgatggtaatgccggcatagggggtatcggtaaaggtcgcgtgggcaaattcgctggctttcacatgaaccagctgggagggagcgtccatctcgtagcccgtgggggctgccagctcctccactgtgtacatgccgggagtcaggccgcccaccagggcaaggccgtcctcatcggtgacatattcgccgatcacgatgttgtccgagtcccgggtgacctggaaccgggcgttgggcagcggcgcggaggtgacccggtccagcttttcgatgacgataccggaggtcacattctggaagacgacagtgcgggtctcgttggaaacgaccgtttcgcgtttctcagttgtggtcatggtgtagccgtccggagcgtaggtctgcttgatgaggtaatcgccagtgggcagattcccccagtggatggaactgtcattggcggtcacgccctccttgatcatggtcccggtggaggccgcgatcagctggaaccggccgttagccagcggcgaaccgtcggcggcatcctccaatcggacgatcagggagccgtaagccaggtcctcgaaggtgacccggttgatttgccctgccttgaccgtgatcgtcttttccgtcacattgggcagctcatagccatccggagccgcgacttcgcgcacgatatagtgtccaggctcgatgggacggatcagggcctcgccctgggcgtcggtggtgtagcgtccgatgaatgctccgtctgcgtggtagacttcaaacacagccccggcaacgccgcggccagtgtccgcgtcacccttgaagatgaccagagaagccagaggcgcgttctccaccaccagggtggccagctggccctccaccacttcgacgcggtggaccgtctcgtccagcagatagccgtccggctgctccacttccttgacatagtacacgccaggggttgcgatcggataggtggcggtaccggtggtgtcggtggtgacttcgcccagcacacggccctcggcggtccggatctcgaacttggcgcccatcaggggctcgtcgtcgactgtagacaccttggtgatcatgatgccagtaagggcggtgttggtgacgcgcaggatgctgggcgtatcaggcttgacctccacatggtggtgggtctcgtccaggatatagccgcagggagccttgatctcggtgacaatgtagttgccagcgggcagaggctccgtaaaggcgatacctgcctggtccgtggtgtaggcgccgaccacccggttggtgttcagctccctgacctcgaactcagcgccctccaggtacttgccgctgaccgagtcagtcttcaagatctggatggagctgtccttgtggttttcgatgatgacgacaggcttctcgccctccgccaccttgacctcagtgcgctcgttggcgatcgtgtagccggccggcgccttggtctcgatgagatagtaggtgccggggccaacattcacggtgacgaacgaaccggtggggtcagtctgatagctgccgagcagcttatcattctggtcccgcagctcaaattgtgcgccggccagcgggttcttggtggacgcgtccaccttgcggaccgtgatgccgctctcaggggtgttggggactgtgatggtggtaggctggccctccttgatctcgacccggaactcctcctcgttgagcacatagccgatgggggccttgagctccttcaggatgtaccagccgggctcgatgccggtgaggttggccttgccgttggcgccggtgatgaaggtgtcgccgatctgcttgccgtccatggcaaacaggccaaactcagcgccggccagcggcaccttgctctgggcgtccaccttctccaccaccagggtggtcttctcgtagttcttcagctgcagcagcgtgacctcgaagttctccacccgcacctgatgccgggtgttatccagcaggtagccctccggggcttcgatctcctggacatagtagtagccggcctccagacccggcacccggatgtagccatccttgccggtcacatagtagggctccttgccgacgggagaaccgtccaggcgcgtgaccgtaaacttggcgccctccaggggcaggccggacatggcgtcctgctttaggatggcgacgccgcccggcttattgttccggaacaggactgtcgcaacctcgccggccttcagggagacattctgcttggggttttcgctgagcaggtagcccttcggggcctcgatctcctcgaccacatagtcgccggggagcaggtcgccgatactggccaggccgtccatgcccgtctccaggcggtctttgatgacctcgccgttcacacggctcagcttgaacacggctccggccacaggcaggcgggtctgcgcgtcctccttgcggatgtacagagtcgtcttgccgtcgttgccgaagaccaggaacacaggttctgtctgtccgacgcggagctcaaaggcctggggcgtagagtcgatgatgtgcccgtccggggcctccacctccttgaccacataggagccaggctccaggccgttgagggtggcgtagccggtggacccggtgaccaggtcggcgatgaagttgccgccggcggtggtcaccatgaagcgggcgcccgccaggggcaggccagtctggttatcctttttgaggatgatcagctgggtgtcctgatagttgtggtagttcacaacgactgtatcatgggcgttcaccagctggaccagccggggttcgctgtcaatgatatagccgtccgggacccgcgtctcgatgatctggtaccagccggggactgcgtcaggcagatggatgataccgttggaatcagtggtataggtgcggggctcgttgctggtattggtggaatcgttgccatcgcccaggtaccggatggagaattccactccagccagcggcttgccggtgatggcgtcgtgcttggtgatggtgaggccctcgcggggctcgttctccactgcgatctggatgacccggtcgctcatagaggtgacggtgaccgtccactcatgggggtccggcatatcgtatccggtgggcggggtgagctctgtcagcttgtaggtgccgttgggcaggtcctcgaacagcagctcgccgttggcgtcggtggcgccctcacggctgaccgtgccgccggcggccggatcgtccaggttgatggactccagcttgaacttggcgtcagccagccgccaggagttggaggcgtccgacttgacgaccagcaggtcgcggtagtgggtgtcggtgaagtcgaattccagcagggtctgtccgggcaggagctgcttggtcactgtgaacccggctccgccatccgactccggctgcgggtcccggttgtacttgtcaggcatcaccgtctcagtgacggcgaccgtccagccgcggtcccagacgatatccccaatgaagcgctcgtagtcgtcataggtgatgtggatctcgccgttctcgtccgtctgcttggtcaggctgaagctggcgccggcgtcgatcttgatatcgaaggtagcgccttccagccgctcctccgtctcgcggtccgacttgcggatgacgatctcagggtacccggtgtcggtaaagacgaaggggagcatttcctggccgcggtggaactcaacagacttccagtcagtgtcgtcaatgaggtagccgtccggggcttggacctcgcgcacggagacggtccaggactcctggttctcgttcaggaacttgccgtaggtatcgtggtcaatgatgatggttccatcaggaccggtaggaccgaaggtaccgatgggtgtctcatcgatcttgacctcgaacacggcgcccgccaggggctgctccgtgccggcagagaccttctgaataacgatctcagggtattcatagttggtgaaggtcagggtgtgctcgcggacctcgtcatgttcagggtcaatggtgacactctgactgcgctggtatggtaacacgaagccggcgggtggcgtgatttcaataaactcgtaggtgccggccgacagcccttctccatccgttcctgcgtaggtgaaggtgccgtcaccctcggttgtgatcgtatcgatcttagctccgttgaaacgaacctcgaacacagcgccagggagaccggcgccggtcttgtcgaccttctgaatgataattgtgtgtttgggctggttggcaaatacgataggcccgcttgagtagggctcttccactccgtctccgttcttatcctccagccagagacggagattttgaacctcatccgtctttacgaatccgacaggtgggatcttttcggtgaccgtgtactcgccgggcgcaatgtagttttcgccaagggggtctgaccactggagggtcagcgtaccagcagcgtcacaggcaatatcacggtccacgctgttcgtgagactcttgaaatggaaagtagcagggccgatgccgttgccgtcctggtctaccttcctcacgattccgggcgaaggcggaggaggagtctcgtcgctcttcgaattgttgaaggtcagcacatcattgccgactgttgtgccagatgtagaatatccggcagcagtgccgccgctgatggtgaccgtgtgctcgtccgggtccgtctcgctcaccgtgtatttggtaccgatgggcaggccctcgaacacgccgctctcgccgtttttcagggtgaaggtgtggtttatcctggttccggagacggtcaggttctggacggaaccgctcttgctgaacttcaccgtggcaggggcagacacaccgctgaaatcgaacagcgcactgaaactgaacgccttggacttgtcgcccttgccactcaccgtcttgcggaccgtgagaggggtgctgcccttggaattctcaaaagtgatcagtccatcggcggtggtgcccgtgtgggaaccgccgggagtgctggtggtccccgtcttaacagtggtggtgtagccgttagagttggcagctgtctcagtgacggtgtaggagataccttcgggtaggttgttaaactccatcttttcaccgtttttgagggtgaattctaggataggagatgtcagcggagaaaattccccattatttttgcgatatcgagctcccttctcgccagctccagccaactcctccgccgagcactggaactctattctgaacggccagtctcggccatcgtctgtgccgaccacttttttctcaatagttagcggaactcccgtggcaaatccggcgaaaaagtagggcgaaatgacggccatgccgtatgcaccatccttcttcaggttgccaaggttatagctggggtagttcttcagcatggcaaaggcagctttttgcatgctcgttgaatcactggctttgccaaccgcgttggggactggttgaaaggtcgtatgctgcgatgcccccgtgattgccttgtccagtgcttcgccaattttatctccggccgcaagctggtctccaaggatcccggcatcatagacctcgaattcattacaggtcgcgcgaatgctgtcgccgatcatgctcgcccaggagccataaatcgaactcaagatggcagatgagccaattcccaaaagggcaatgtcgcgcagggtaaccatcagattcttgttcccggtaccggatctccccatagcaaaggtgcctgcctcaacgatgacccggtagtcgcaattttcttcccgttcaaagtccagatagtcaaccttgttggttttcagccagttgacaatccaggacttctctgcgcctgcaatactctttggtggcattccagtggacaacatcagcagcaacgcgttccagtttgtgttctcctcatagatgccacggtttgtagtggacgcttggtccgtttttgtaccaaactggttgatatgggccatgctgccgcggccagcctgcgcctctttatagaacgagccaataatattaccgttcaacttggaagggtcaaacagctcaggccgctctttaagagcttgcgaatcagggaaggcctccttgtatgcctcaaacagcttggcaccaagggaggcaaactcactttgcccaacaccgtaatacagcccaggcgaagtgtatagggccccgctggaagaaagcgacgatgcatcatgctgggtatagtccagagaattgaatgtccgggccccgccttggttcactgtgttcataccagccgtcttagtgtaggcaccatccgcataggaggtgccaacccagagcatgctgtctggagcatcagtgagccgattctcatatgcactgtcaacaatgtcaacagtaccgatgacctggtattcgctcgggttgtttgctccgcttgggagcttgatcagggtgtagcgggaaaatgcattatagtcccagttccagccttgggggttggtaccagcagcgcctgcatcaccggttgaaccaccatgggtccctccgccagccgaggccagcgttgcggtcgggaccaatcccaggagcatcactatggcgaggatggtggatacccaccgcttgaaagtaaaagttttctgcatcttaggaatccctcctttatgtgtgcggttctgcagtttccgcggtcgaatttgggttacagaagaaatgctgtcctatgtccgcaatcatatctatcaccacctccttctttggacgcaaaattgggaactttttgaccctgctttgcgcggtccactactattatatgcggattgtccgaaacatattttgcaacaaagaaccaccgggttcagagcgtagcaaagcgtccaggccggacttcttcctatgctgcgatgatatgcaggcgtggatgtggctattggcgcaaaaaaaactccagccggtgattctcggctggagatgacgatttttccaaaataagtaaagacgcaccctaatttagggtgcgtctcgcatatacgaagacttcaatcggggtaacgagtgtaaatgacattatgtccaaagccgggggcctcatctttcttccaaatggcatctccgccatcccaagcccaggaaatcttcttggcccaattcccatcggcacgcccggatacttgccaaagcccagtttcctctccgaaccaactttctcccagcacgatccagacatgcccgaccgttttcccgtctcgtccgacatcgaacacaatatctcccggccgcaccttcgagaagtccgtaacttcccgcatctttgcttcttccgggaaaatcagatcagacaccatagccgcgaatccgccacacgcatattccgaatcgatatggtatccaccctccatgacatcgccaacatactggctcacaggatttggattgtgcggagtatcgggattggtagtcgggtcagtccacggagttccggtcggatactgtttctcgatctccttgagcatttcgatcacattctccggagttgcggccttgccatttttcagggaccatgagccagtagcggcaggaggtgtgggcgtagtctcagggtcgaccagaggctcgtcggcagccttattgaccacctcgttcaaccggaccatgaccacggcagcctggctacgggacatatagccatctccgctgaaatcgccgcggctgttcaccccagagatgagcccggcgccgacggcatcctgaacggcgttgcaataggcgggggcaaggttgttccaatcaccgataccggcgcggacggcggcgacatcatagtttggaacggcgtcatagctcttcagcacattgaccagcatcgccgccatgttgtagcggttcagggcctttgtgatgagggaatcgtctgcgttgtgaatgcccgccagctcggtgccggcgaacagtccggcgtcgtcagctacatggaagaagctggtgtaccacttgtcggtcgggccgctgtaggcttccagctcgtcgctgaagtaggcgcgggtgagcatggtggcaaattcggcataggtcacctggttgtctacgccgaaacggccgttgccaacaccggcgacccagccctccttggcagccttctccacgaactcataggcccagtggtcggcgggaacatcggagaaagtgggtttgctgggtgttgcgaagatgccggcaaagatgctgatgagcatgacggccgccagcaacagggatatctgcttcttggttttcatattgaaatctcctccttttcagaaaggtgcggtatattcttgttttagaaaacacccactgtttgtttccacattatattatatgcagatacatagaattatatttcgggacggatgatgagagcaggtccgcacgccatacacaggtttctgaaagaaacctgtgcgggcgagggagttgggcaaagagaatatcttctggctgttttcttctttagaaaagattgttagacctccctgtttgcagcaacgctgatctgccccatgattctgttctaacgaagaaaagctggtagggtctttcgttgctgccagtggctctcgcccgagccggttccctatcaggaacctatgttgggtccgtgagacagcctcatattccccatgaaaggaaagcagtccagccgaccagaaggtgctccctccggacagctggacttttggactgttttagaatttggtaaggcgctcaatctcactctgcgggatgcccatgatttgggaaacctccaggatagagaacttctgcaggaggcgacgcagtgtttctacccactcctccaggcggccttcattgcggccttctgcgagaccctccttgcggccctcttcccgctttccccggccataggcctccagctcaatctcccagaccttctcctggctaaacaaccttgtcatgatgtccacaaccttctttcgattgccctgaataggaggcaacgcgccgtttcaacaacactagctccgcggcacttagattttggtcagccgctcaatctcactctgagggatgcccatgatttgggaaacctccaggatagagaatttctgcaggaggcgccgcagcatctctgctcgttccgccactcggcccttttcccgttcctccctggcgctggccgccagctccatctcccagaccttctcctggtcaaacaaccttgtcataatatccaaaacctccttcttccggctgctcaggaacgggaccagtatgccccgctcccggcaaattttgatggtgtttgtgagcgcctcctctgtgcgcccatactgagcgacctgttcacttgatatctggcagaaatctacatactgggagaggatgtctccgggctggccgtcctggaggacctggacctccacctccactccggcggccccctcgtacatatcgctgagtttgagggtcgtgggggtcttgtgctcgcctgtgtagaccacatagagctccggccttggaatggtcaccttcgtgctgcggtacagggacaggctgtgctcctccagatactcgctgtaagttttcgccagatacatcagcatacgcagaggaatgttgggtgagaaggtgctctgggcctccaccataaggatcagcttgtcccgaacttggaagcccaggtcgttgtactggccgatggccaggatattttccagggtcaccagcttgatgtcatccgtctggactgtggtgtcctccgggtgcagggacagatacagctgctttgtatattcgggctcgctaaacaggaaggtaaacacactgtccttgatgtcgcgcttgggcgtagacatatcgatcatccccttttgtacctgtattataccatgagcgggtcggagagcgcaatagggggagttggctgttttggacgacacggcttccatgagagaagccgcaacatagatgtcgtgtcatctatctttctggattagaattgtcttgcggcaacttgcatacgatcggttgtttctccaatttagggatgaaagaccgatgagggatatcttttggcggaacaaacgcaaggagaaaaacgaacctcaggaaacacgaacacgacagggatacgagatatccctcatacagagcgaatggccagtagttgccgctttcctccctctacgcaaaaggaggaaagtcgatatgtttaatcatattttggaactgcttgctatatgtctggtgctggccgttgtgctggcaaccttcctgaagtacctgttgatcatcttggagaagttggcggccatcgggcacgcgctcaaaaacctctggaactctgctaagcagaggagggccgagcgcaacctgaaggaaatatccgacttctcccagttggtggcagaaagggcgaaaacgctgtccccgaccatttgcgagatggccaagaacggcgtttccgtcaacttcgatgtggcagcctttgcccgctctgtatgggagtcacaaacctacaagagggaaaaactgcctaattcgattaagaagatgctttttgctttgctgaaggcggtgcttaccgcactgttgaaggctttgctcgaagcgatcttctaagatagtatccacccaatcgggaggatagcggcctgtaaaatacgggccatttgcatcatatgcaaagcatgaaaatattattggcgcaaccaagcgccgatatcgacatttgccttcttggcgtttttacaaacagcttccgggtttccggaggctgtttctttttgtccagagtacgatgggtcttgccaattacaaaaaaaaccagcctggcgaaccgccaggctggtgagaaagcaaatattctgtcattgctggatcaagcggctccgaaaaactacctgtccattatgatgcgagcgagatgaactctctcctgccgcgccatcctccgaggaggtaatcatagggccctttggccagccggtcaggcttgtcgtgtcgcaccctctttccccgccgcccactgcggcaggataagaggcttgcggcggcacaccggaaacgaataggcctacgcatccggcgtccgtgacctgacccgcttttgggcgggtggccgcagaccaggcgaaccttgaagcggattgctccgcccccgagcggggtctgccagcgcggggaccctgccttcaccaatctgttcaggagcggactccttagccggtttcccggcccagacgatgtaccggttgagcggcccgaaggcctggacttccagtgggacaaggtcttttgctttcctgaacatagtgtatgccggacatgcggatttgtcaagcatttttctaataaaatcgaatatttttttgagaatttcatgacaatttgcggaaataggccggattttatacattattcattctgatttgtgcagtgttgtttttgcgtggctcatggacggatttcgatcttgcgcacaggcaggaactctttgttttagacaacaaaaaaagcacccacccgggacaaacatccgggtgggtgagaaggtcatattcgcaagcctgaaagaagagggcggttcacctcccagaaaccaggtttgggaactcacccgcacgatctcacggatggctcgcggcctgattagccgggaatcggaaatccgttcacaaggcggggcgcgtgtgcgccgatgcgatgggagactttgctgatgctattttatgtgcggcaccgtccaaaatcaaagggttttcccgaaatagggaattttgttttgttggagcctggcatattctgggaaacgaatgcggagcgcctcgaagaacgcctccatgagttcgcagcaaaacaggttgtccgggagatattcctccgtggcgccactcccgccatctgagccgcagccgttccaaaggttgaaggcgaggcgggtgacccggagcgatgtgccggtctgccagcccgcctcggctgcctccgggcggatggaccagtcgctccaatcgaagatattggagaaatggtcccgggtctcagccgtgagcccgcaaaggtacgccagcgactcaaaatagctgtcttggcgtttcttccgccttttggcttcggccaactggtccaggaaaaaatccttgtgctcgaccgaagaaaagaaaaactcagcctccatgcgtatccgctcccctactctaattttgtagctcccagtatagcacaacaacagagccctgcgcaagcggcagtgttctggcaggtctcacggacccgacacaggttcccacgagggaaccggcccgcggcaagagcctccggcaaaagagaaaatccacgcccgttatcttcgttaaaaaagacggataccttccaaagaagagagaccagccctgcaaaagaccgccctctcccctactacttccgttgaacgcaacaaagggggctcggtcatagccgagaagctgattctctcaccgaactaaagttcgggagcgtcctgtagctccctgtagggagcctatgtgggctacggttcagtgactcttttgccgctgcagttcacccaaccaggcgtcacgcgccatgctcaccatctttggtccttcgaatccatacaggccgcaggcaatgaatggatggcattcgatagccaccgtccggccgccctccagcaggaccgccacatccagagccaaggctgggtattcccggagagtgtctgccatgtcctgtacaactaccgcgtctggggccagccagcgctccatgaagtagggccggatgtccatgacgcgccccctggagatgaagacgcgccattcggatgtgaactgagactggatcatctgagagacgaacagcagctcgtcgtcaggaatctccccaagcagccgctcctcataaggcatcgcctcgaaccgcttaggatggcggctgggcttcagcagcagcggcccaaattcggctctcagcttgggcagttcagccttggacacatcccggaatacccggcggcccaggaacggctcatgctccagctcaagcggaatattcatggcttctatcggtcccagccccatctgggacaaatactggttcacgaactcgatgccgcctaccgggacgattgtcctggctgcctgcccggtcagggccagggtacagccaaacttctcctcattcgccaaccagttagcctcgttgcaagactccgggaatggagcggccagcgaaactggccacccgttccggtccttctgcagcaaaaacaaagtatcaggcactgttttttgcctcctccttaggcgggtggatgctgaacagggcgtagatggtctccatcttgatggcatccaccgtcgcttcaaacatgtcgtagccttcctttttgtaggcgaccaccgggtccgtctgagcataagctcggagcgtaattcccttcttcagctcctccatggcgtccaggtgatccatccagttcttgtcgatggaccggagcaggaacagccgctccagttggcggaactgctcggttccaaactcattctccttgcgctggtatccggccacggccgactcatagagtgcctccgtcagcttgtccaaccccatcgtcttgagctcctcggttgtcaggtggaactcatccggcagcatccacatggcccggtagggcttcagcatctcctggaaccgcagcgcatccagctccatattctcattcagattggcaagaatattgttgcggatgaccttgtgcagcatcttgaggatctgctcgtggacatccaggccatccaggacttgctggcgctgctcataaatgaccttgcgctgggtattcatcacatcatcgtactccagtacccgcttccgggcctggaaatgttgggattctacctgccgctgcgcgctctcgatggcccctgagaggatcttggcgtcaatgggcgtatcatcatccacacccagtttatccaggatgccctccacccggccggctccaaacaggcgcatgatgtcgtcctccagggacaggtagaagcgactctcgccagggtcaccctggcggccggcgcggccgcgcagctgattgtcgatacgcctggcctcatgccgctcggtgcccaaaatgaacagaccgcccagcagttgaacggccttggccgccgtgctggtctggagccggtatttagcctctgtctccacatattcacgccgcagcttcagtatctcctcattgtctgtatcggcatagctggcagcttcagccaacagcttctcagagacgccattcttgagcatttcctccctagccaggaactcagggttgccgcccagcatgatatcggtaccgcggccagccatattggtagcaacggtcacagcgcccagcttaccggcctgggccacgatgcgggcctcatgctcgtggttcttagcattgaggacattatgggggatacccttctgccgcagcagcttggacagctcctccgatttctcaatggaaacagtacccaccaacaccggctgtccccggtcgtggcagtcctcaatcttctcgacgatggcccggagcttgccggcggccgtgcgatagacggcgtccgggtggtccttgcggatgacaggcttgttggtagggatctccaccacatccaaacagtaggtgttcccaaattcttccctctcggtcatggctgtaccagtcatgccggacagcttatcgtacagccggaagaaattctggaaagtgatggtagcgtaggtcttggactcgttagcgatctggacgccctccttggcctcgatggcttggtgcagcccttcattgtagcgccgccctggcatcacgcgcccagtgaactcatccacaatgaccacttcgccgttgcgtacaacatagtcaatatcccggcgcatcacacccctggcccggagcgcctggttgatgtggtggaccagggtcgtattctcgatgtcacccagattcttgacatggaacgcagcctcggccttgcgaatgccgcgggctgtgagggtggcggtacgggccttctcgtccacgatatagtctacatcaatgtctggcgcctcttcctccttggcgtccacgctggcaatacggcggcacttgagggattgcacaaactggtcagccatcatgtacatgggactggccgcctctgcctgcccggagatgatgaggggtgttctggcctcgtcgatgaggatcgagtcgacctcatccacgatggcgaaccggtgactgcgctggacctgcccttccctggaaacagacatattgtctcgcaagtaatcgaacccaaactcattattggtcccataggtgatatcggccttgtaggcagccatcttctcaaagggcggctggttctgatagatgaggccgaccgtcagtcccaggaaccggtagatcttgcccatctgctcagagtcgcgcttggccaggtagtcgttaacagtgaccacatgaacgcccttcccggataggccgttcagaaaggcgggcaaggccgccaccagcgtcttgccctcgcctgtccgcatctcggcaatccgcccctggtggagaattattccgccaatcagctgcacccggtatggatacataccaagtacccgccgggccgcctcacggcagacagcaaaggcgtcagggaggatatcgtccagggtctcccctgccgacagccgggcccggagggcatctgtctgcccctggagctcgccgtcccccatattcgcatatttactggacaacgattcgattttatccacgatcggcatgatcgccttaacttcgcgctgggaagaagtcccaaatagcttctcaaaaatattcatgtttccttacaggcccggatagggcccaccctccttctcagtcaaaaaatctgctccgccagcgaccggcagatactgcttgggccgttgaagttgaccagcagcatcgggatgccggtgcccttgatgaccgacttggcctgctcatagctcttgtgggagacatacttggacaggatgaccaccgcatcggcggaggatagagtgtcaggcagccactcgttgacggcgaagaaccgccattcggggaacagcttccggagcacccgttgagtattgctgtggccgccgacgatgactagcttcttgccggagagtttctggtaggcgtcttcaccgatgcgttcccgcacgcctgtgggggccggaggggcgtcctgctccaacaggtcctcatcatccaggaacgggtcttgctcctcgatcatgctgataagctgggcgttgatctcgttgaaggcagcctgcccctcgctgactgttgcggacaactgcttgttctcctcctgggctttggcaagggccgtctttgtccgttccaggtcgatggcaaccgagtcggccttcttccgggccttggctacctcctctttcatggccgtaacttcttcattatatgcagaagaccgtttagtctcccgccgctcctcctcaatagcctgctccatgccggccacatccttggcgtgcgcgtccttttcggccatcagcgccttactcagccgggatgtggcgtcagtcagcttggcgttttcagctctgacctcattgaaggccctgacggcaggcaggactgtctcccgggctgcctcaaagtagcggtccttgcgccggtccacccgtctggtcatcggctcgacctccagcccgctgctgcggacatagaaaatggtggacattagttcctggaaccgaggctggcaggaggccacggccatgaacgaggggttcaggcagctggcctgccgagccggtgatgaagacgggtcggcagtgaccgttgcgtcgtcggagaggatggtcgtccacacagttgccatctccccctcaaaggagaaattgggggtaccgaccatcagcatgaaaacatagttcatcatttccttgtacaggtccatgagttctttgccggagcgggtttcagaaggatgagtgggcacattctcttgatctctaacatcgaactttctgcccagcctcggctgcgggatcgcggcctttagttccttgttgaccatatcaaagagcttggcgtggttcttcttggcattgggaaatacacgccgcacatattgctgaaagacattcttacaataccgcgtttcttttgcagtggcggccatgatcagccccagatgcgctggatccatgatattctgccagggacggaatgcaggaccgtctccgcggaggcaggcagcatactcctcccgcttcccaaacttcttgaagtactgatccagctgttcctccaggtcagcgaatgcgtcgttgattttcttattggagaaccagcagggccggaaatggatcagtattgcattcatgatatagagcgtgcagcagctttcgctctcattttcgattgattcgatctctttttggacgatgacatccatgaggaattgtttatccataatgactctccttaaatcattttggcaatggcttggcagatgctggtaggcccattgtagctgatagtgagcatggggatgtcggcgctcttgacggcggcccgggcctgctcgacatttttgtgggaggtgtatcgggccaggatggcgactgcatccacagcagtcatggagtcggtgagcttttcatcgacggcaaagaaccgccagttggggaacagctcccggagcacccgctgggtgttggcatggccgcctacgaccaccagccgcttaccggccagcttttcataggcctcatcgccaatgcgctcacgcaccccggagggagccggaggcgcgtcctgctcccgcaggtcgtcttcatccagaaacacaccgtcctcccacagcagattgatgtactgctcattgatctcattgtaggaagcctggcttgccttgaggttctcagacagctgcttattcttctcctgcagcttggacaggtctgccttggttcgctccaggtctacctcatacttctgccggacggctaccagttcctccttgagtttggacagctcctgctccagttcaggggcggctgtccgcttggacatctcgttcagctgagcctgcaaagccatgttctccgcctcagctttatccatctggattttcatcttttcccgtcccataagcgcgtttccggctatgttgacctgaaactgtatctcttcatccattccttccatgatgggggcaaggacggtatcatgcaatgtaaagtaccgggaccgatcctcgctgtttctgctatacagaggcgtgaccggcagttggctgctacgcacatagaagatagtagagagcagccgccgaaactcaggacggcagaggtaacagaccataggctcagggttcagacaagttgcatcccgggcaaacaggctgtcgatgtctacttctctgaagttctcttcctccatataggaccagcgcatattctccggaaggatcgcgtctgaatagggcgtctcgggcatgaggatggtgatataccgccacatctcatacatgaagtcccgcttctccccggtattgagttgctggaagggcagttccctcataggcaggatgcccgccgcggaaagacccggatattggacaaccgaatccagcatggagctgatgcgctcttggagcggcgccacggcgggtttgatcttgggtgttgacagcaccatgggcgcctctttgggtttagggaatgcccaacgcaggaatttggacatggtgcgcatgacaaattttcggtccttggtttccttggatatgtggagtccaatatcctgcggagggatgactcctctgttaagctcgtcgcagcaccggatctctcctacatcaaaggatttgcaggtcccactttccaccactattttagagctctttgcaatcgaggaaaagaaagcatcccgtccagctttctctcggtaggcggaaagctggctgcacaggtcagcaaaggcaggctcaaacttctcgctctggaaccagtcgggacgcaagtatgccagtacgctgctgtacagataggcatcgatcaagggcccctccaaggggagcgtctccgggcctttaccctccaatactgttgccagaaagtcagcataatcgatcataatttcctgttttgtcataccaggtcactcctttgtttgaaaataattgcggatagcggctgccagcttcgggtaacggaggatcatgtccacgaccttggattcacctgtctgctcgctgcccagaatgtcgcctgggccccgcagctgcaggtccacttcggcgatcttgaaaccgctgtggaacatggtcatggccgccagcttctcattggaggtatcgctgaccaggcagcagtagccttggtcgcctttgcgacccacgcggccacggagctggtgtagagccgccaatccaaaccgattggcgttcatcacggcaatggcagtggcattgggaacattgacgccaacctccacaatggtggtagaaaccagaatctggatctcgttgcgggcaaaccggtcgattacggccagcacatccttctgtttcatatcaccgctgatactgtcagccttgtacatgggagcattgtcacggaggaactgctggacctcctccacgaccgtcttaacggacaggacatccttgaaccgctcgctctcagagtcctcaatgaaggggcagacgatatacgcctgatgtcccagcttcacctgctccagcagtttctgataaacatccggccgcttatggtccacggtagtaatgactgtcttgcggcccttgggcatcgtctggatggtgataatatccaggcagtcgccgtagacggaggaggcatagctgcgggggataggggtagcggtcatggagatgtgatgagcgccagttttgtcaaactcggacaacagcgctttctgagcagcaccaaaccggtgttcctcgtccacgatggacagggccaggttccgaaactgaagctccggagagaggacagcgtgagtaccaatgaggatgctgatgctgccgtcagccagccctgccaggatcttcttccgggctttgccctttgcctcaccggtcagcaaggcgatgccatcggccccggccaggttggacatctcatcgtagtgctgcttggccagtaccagggtgggagccataataatcgtctgaccgccattctcccgtgcgcagagggccgcaatgagggcaactgctgttttgccgcagccaacatcgccagagaccagagcgttcagaggcgtctcctggttcatgccgtcgtaaatggactccacagctttactttggtccacggtcagctcgaaaggcaggctcttgatgaaggcgtccatggcttcccgtttgggcatcagcttggcccgaacgaacgctttgttctggcgccgcttgaacagagcctcgtagaaatcatatatctgctcaaagttcatccggcggctggccttcttccaggagtcctcgctggagggccggtgcatctcctggtaggctgcgacacgctccataagacccatagccttggccacagcatccttctcggtccaggctgcagtggcggccatcacagagaggctggcgctgatcttctcagacaggtatttatcggacatgcctgtaatcttggagtaacagggatggatgtgggccagcttattctcgccctggcagaccatgaccggctgcaccatctgcggctggccattgtagaagctaattttgccacagaaggtccatagtgcgccgcgctcaaaggaatccttgaagaaacagccgccaaaccaggagatatagatatagccgctgccgtcgtccagctggagagagaacttggcattatcatagatgcgggtaacaactccatcgatccggcagacatctccatccatcaaatccttaatcttcttcttggtgcggaagtcctggtacttgcgtggaaagaaagcggccaattcttccacactggtgatatgctttttctcaaactgtttctcctttgcgggagaaacctggattttactcagtggaatcatatttggaatacactcctttccggggttggtatattgttcgttgattggaagttcgcccgccgggtcttttttaacgaagaaattggcggagaaatttgtctctgccggggccttcgcccgagccggttcttttacaggaacctatgtctggtccgtgagaactctgctgtcgctgacaacaatttaggtctcgctctcgctgggggcgccaagctcccggcgaatatgctcggccatcagtgcggccttttcgtccaggctgatatttttctcccgtaggccggcgctgcctatgccaagctccttgcccagttcatagaggaaattgttgatgcccaggctgtagctctcgtcgtccaacttcttctcgtagttggagcagcgcagaccctccagggctgcgttgacgccttcctcatagccagccttatgggcatcggcccgggcgatggcaatggcgtagttttcccgttcagcggcgatgcaggacttcagatagccttcataggcggaaacatcgatatttttgggacaatacatcacacatcctcccctttgatgcgaatgaccgggtcttgcatgacatcctgtacctcatcgggatgcttattggcccatttgatccagcggcagatccgggtccgtacaactggaagcgaaagaaacggccttgaggtcaggatcaggtttcggtcctgaatcatcagcgccgtgttttccgctacctcattcacctcatagggtgtcggcagcagtgtgcggacaagccctccattcaaaccagggtcgatgccgcagacttccatttcaacaagctcgtatcgctgctgtcgccgcatgaccacgccgagacagtccccggccttcacataaattcgatcgttcatactcctgggctacgatggcccaaccctccttctctctttcgcaccatgcctccatgccggagacacattcgacatctaatttgagcattctggcggggctatacccctgaaataggcttgatctggagctgaatgcagtacagccacggatcccggccaggccgcccctgggcgcgggatgggaccagcatgagattatagtcccggtggcaggacttgctcacggcaaacaggaactgcggcccaaggcccagccagtctgagtaccgcaccggatgcacatccttgaccgtgacggccatgcgcccggccctccggggcatccgggaggcactcagccattggatttgcccctctcccctgccggcgtcgacccggtagaggaaaccagaacggccgtcctcggcccactgctcagccaccaggagcgtcgtgccagggcggcaggaagccaattgcggcaggtcgccgtcctgcggttgaaggcgcgggaggactcctatgacaaggcttccggtgcgccacagcacacgaatgtgctcagcgtatagaatgattctcacagggccgcctcaacctggtgcggcaggctatccggtaaattggaaatcgcagcttgatagcgcattttgaagcactcccttgacctgttctgatgaatgccttttcacttatattatatgcacttcacgctttttatattttgtgaactactcccactaaatgaggacggattccctcatttagtgggagcttcgatagacgcgagtacagggaaccgaggtttcctgcactcgccacttcgtcgcagttaaaaccgcaattccatttggcccgttcacgaggccgctatcccatagggactacttgttaagccgttttgcccaccgaaatgggcttcatgtccggatgcttgtacaccagcaccctgctaaagtcaggcatgatgcccctgacaaaggcgtcctggatcgccttccgaatagtattagcgctgccgttgaagtccgagttcaggacctggccgctcttgctgcggtacagcccgcgcttgaaccgccgtccggagaacttcacctggtcggcgccatcttcgccataaacaggaatgaaatctccgtccaggaacgacgccttggaggtgtaggattcctcatgctcgatgtagcggatgcccagccgctcagcccggtactgcagctgccagcggaacttcgcaaagggcagggatacaaaattctgattgttctggctccccatattggagccttgcttccagtctttgttcacgcccacgatgatggtgtccacctggttctccacgcaccagcggatgacgagcttggcgaccttgctcatgtagtcactgaggtagttgtcccgccggagctccagtctcctggactcgggcgtaggaacaaaatccttgccggtgcgcgtcatctgctcgctttttatagctgccatctgcttgttgtaccattggtttgcggatttcgccactccgcccttaaacaagaggcacggcttgcctaaattgtttgtgatggctgcgaagttgttaactccaagatcaatgccaatgatacgctgagggatctctaccggggttggcagctcgccttttacctcggtggtgagactgacgacaaagataccgtgggtggggatgatcttcacctgcttgagccggccctggatgggagctttgcccagagacagccgctccctggtgaggggcagcttcagctcatgtgctcccttcccggcgtcataaaggacgcagtcctggttggtgagtgtggtcgtgcagcagccgccaggcttgttatccaggcaacttaggctttcccctgaatttgccggggtctcgcttgtactcccgcttggcggcatagtaggacttcatctcctggacgcagtctttgaggacagcctgagctgcctggcggggcagcttgccgcaaaggaagtccgggttgttagttgccctaagcagtgattccagaaagggtagctgaggaacgactttccctgtgcgggcatcttatagcggtccccggcttcggtaggctgcttgccagcagcgttcatcaccggcagtgctctggcgatctcgtccaggaccccgcgctcgttgtcagtgagagccgccgggtctttttccacggccgtgatgacctgccgctgccggaacctggtggcgttcttcaggttgttggccgccccacagaggtcctcgaagtagctgaacatcgggtgcgtgttgtttacctgcgtggttaaaacatgaagcattgcaagtttcctcctttcttttgggctgaaaatataatgtgccaactgtttgcagcctattggcgccatgcggctcatttcggtgcaaaaaagggggggggctgatgccctccccatctgaactgataggtcgtactcctatctaaccttatagtgaaacgagaccctggcaggctcaatcggctgtagtttttccggggcattcaccccgcccctaattcgctgaattagggagggcactctgcccctgcgcgctttcgtagaatcttttgtttctgattctctcaccgaactaaagttcgggagctacctggcgattttttcggtgtgcaacgattaagcggcactgaacaccaaacagagcttcctgcgccttccatgtagggaagtcgcaggaagctgatgcagcgagtgatttcggcaaagaggaatgttcccggccattttcctcgttaaaaaagtaaaacagcagaggggcgagcctgcccctccgctgttcttttgtgttggcactagattagtatctcatccaaatagacgaagccacgaattctggaatcgttgaaactgatgccattcagtccaaggctgccccaccaggtaccgctgccggcctcactgatgtagaagcgtttattgacatagtcgacagcctccacataggcaacatgtccatagctgctgctgctgtccatactgactagggagtttggcttgggcgttgtgccagtaccaaagatgccagctgcctgggcattgtaataaacctcgccaccgttgccccagttggactgtttgaactgagcaaccgttacctgtccggggtagaaggtcatcacatactgcaatccgcggccacgcgcccaccaggtacactggagcggggtcagcgtgttcatcggttgacacagatacggcatcttgcctgccgggttgaaatcgctgggcgaataggggttctgcttttggctgttcggctgaagcccaactatcaggttcagctcctcgcgcagctgtttcagggcctccttgttgatggaaccatctgcattgttcaggttctgcccaaggctgccggcgccatagacccagttggactgatagaagatggtcgagggatccacattcttcccgtcaatagtcactgaaaagtacaagctggcaacaccattctggttcttcccggttttgccgatcaggtcgccggacgagacggtggagcctgcagaaacgctaacttctttcaggttgccataggtgacctgcatgatcttcccatctggaaggttgacctcctggaccacatacttgcccttggaggacgagccagtagcgccaacatcatctacctcaataatcttgccgtcgccaacggccagaaccgaggtcccctcgcctacctgatattcgatataggtgccgttgtaagcgttcagtggtggatagtaggagcttgttggtgagatgattccttctatggttgttccggttccaggtaccaactggatcgtattgccataacccatcgtgccaaggcccttgatcgcattcttgcccacaaacaagaatacccggtgctcatccttagtctcttccctgtaggcatcctccacggagccaaagggcagctgagtgctgaatgtgatcgatgaatagacgatggcttccacatccatggaattatattgagtcgccacacggaaacagtggtcaagggtcgtatcaggcggggcaaacagcagttcatccatggctttgaagaaattggcaatcagatttgctgcactctcgccaagactaatgaaccaggctccagtactctccagccagttcctggctgtttcatcctcggtacctagatgagcctgcatattaacggcatccaacaggtcaaaatcctcgatttcatagagcctccagtcagactctatgtcgccgtttccaggcttaattccgccaatgtcgacctcaccggttccgatggtcgaggtcgtaatgccaccgcgaatgtagttataccagactttatagccggcttcattcaaatgcagaccgtcaccgctgtcatactcaggattcagcttaccatcttgctggagcacactccaaatatcgatgatttggagtcccttcgaattagcaattttctggatgctctggttgttcttcttgatccattcattgctgacgctggagtcgtatttttcctgcacagggggcattgtcagcacatagatcttgatattgttgccggccttttcgtagacggcatctatgagcttattatacttcttgatgaagttgtcctcatagtccagatggttgttggtgccggcacatatataagcgacttctttaccggcccacctggacgcatcggtatcctctaccagttcccggatctggtctgtgctggctgatttttgagcgagcaccatagctccgcttgaagacagcttgtttgtattattgagcccaactgtcagtgagtcgccaataaacacagccttagacggatcaaagttaataccctgcccactaatcgcattcgggtcagcaccatccagcttagctgccaacgcgcgaatctcatcaggacccaaagcgggtcggccccaaatatcattcggacttggcgtgttggtatatgccaggttatagtagtggacgccattggtcatgaatatctttgtaccatgatttgggttctgcgactgaaacaggacattcgacggcaaggcaaactgccctgtcatacattggatggcactggcgatttcactttcggttggattagccttagcccaagacccatttgaataacatgcatactggtttggggctgtcagcacttcccaataggtatcaggaaaagtattatcgcccttgacacggtttacaaagactgcgccgactaggagttcatcgagtttgcccagcgtgtctccattgtgcgcctctgccgcgatacatttggccagaatatacaggtcagaatttgagtcctgcatatctgccatatcaaccatccccatggccgtcaggctgccgccagagtatggcttcagaaaaccaagttgcatcagaaattccaggttgtcagcatactgctgggcttccttgttctcagcctcattggcggtgccgtccaactgactcttcacagccttcaagccggtacgcaggaagaaatcgcggtcattcatgtagtcgttgggagcatatgtgacatagttgtctgcatactgctgtagataggcaaatccccatggagaatcagtctcctccactttgggcgtctgcacgatcatctccccctcgcgggtggcggtcaactgcacactctcgctgcaggcaccagagaccttgatggttttcacggcctcacggtggtcactgacagctgtcgtattggcctgcagcggcgtccgggtctcaacacacccatcttcaccagccggggtgatcgtataatggatattgccagagaaggtggccgcatggttgattacggcaatgttcaaggggtacagggcagttccgtggtttgcaaaaacatctaggtcactgctaaactccaggcgagaaatttcaatatcctttgccccctccaccttcatgtcaatgtgctcattggcgaatttccggtttatggtggcctcattgtccttattgggctctttagtgttgtcccaattcgtggtgtccgataggattgccttgatgtttgtaggcaggttatatgtgtacttatactctactgtgccgtcatcattaccggtcggcagagtgctaatgtgattctgaatagattgtcccagtgtgctctgagatttgtcagccggcaccgggaaggatttgaccttataatggctccaatcagaccagtcagaccactcgcctccatcctccgtttcgatccaatgccgggaggcccggtcaatatcggcatcgacatctgtgtaagtacaggtgatatactggatcttctgctggggttcatactgaagaaccgagccgaaaccatagtcccacagcccaggttctgtgctgccagagccgccagagccatcgataacattccgctccgtcaacgaataataaggagctgtgccgtcgcctgggtcatgctcggtgggcgtctgcgacttagcgatcaatgaaggggtctcatcactgatgccgtcaatatcagtgacatcaagctgtgaccgatctgtgaccatcttgtcaaaatccttcacaagactgtcctcggggttatcgaaattatcttcatacatgggagacttatcaccagaagcatagccagtcgggagcagcgaggtataggcggtcatttcatcgccctctttgtcctcaactgtcagattcttgccgaatacaggctttatgacttgttccggataataaagcacattcccatgcaaagtctcatccaccatacgaataaaatcgtccgatagatagaaatagttttctccatcatagtagtcacggagggcagaaaagtcagccgtttcgtcctcatccgcaaattcatacaacttatcgttgtactcctttgtaaacgactgggtggacaggtatttgtaataggcatctaccacagcttgcggctctgtttgagccaaagctgtcacagccctcgtgttctcatcaatgagggtagggttcatcacggccgggttaaagtcgttcacctgcccagacccgcgctcaccataaataacatccgcaataaccacgagtacaaggacaatgaccagtaggatcaaaacaaagggccaggcaactacaaggagcttgacaatcaagctaatcagggtcttgattgcggtaacggccgttttgacagccgcctttacggccgctttcacggcctttgctgcggcctttgtgaccttttttgctcctttttttacagcttttccaacttttttgcctactttattagcaaccttctttgctcccttttcggctttttctttaatcttaccagttacctggtcagaggcctgttgggaaacatctcccatattattaacaccgttgtcggccatatggcattacctccttcttgagaaatgtgagaaagagctgcttctgcagcaagctctcaaactgaacaacataccccgcataaaagaaatactatgcaaactggcagcaacctattgtcccaagagcatttccaactgctatatggctggacctccagactgggcggaattcttttttaacaaagaaatgcgcggaaaggcccatgcttcgccagagattttgctacaggccggtcccctactgcagttcccatatgggaagctgcgtggggacctatgtgtggtccgtgagacctgccagcctttgccgctggacaaaacacggagctgtgcaaatcgttttgtgcaaccgggaggtgtctcacgggcctagtgctggctcccaacggagtcagcttgtgcgagagagctcctggcaaacacccataacccaacccttttcttcgtaaaaaagacccttgtaaaaaagaagatccccgccgccaggccaaagcccggaggcggggcgtaaagatatatcttaggtcccagacagcagagacgcacgaacagcaaccaacgaaccagtgtgagtggcctcatccagttcagtcatatgccgggctgtctcctcatcgtaaccctgcccaacaggcgctgcctgatagggcacatacttcaggaacctggcgttctccagaccggcccggacctgatcgtcagtgatgagtctgaagtttgtcttttcggtgcgccggtagaacagttcggctgcttccagggcgtccctgtcgttttccaccagaagcaggaccaccggctcatccagaaagtatttaccccagctcttgggcttggagacaaaatggacgaccttcttgtccagcttatcccgccagattaccggcagatcaaagttgcggattgtctccaacaggaacgaatggttctgtccgttggcatcctcaatttcaaaggcgccggagaagcggatctcccggtgtccgaatgctacatcgaaggccggtttgaaatagcgcagagatggaccttgcaccttggccagggacaggaagaactcgacagtagccaggtacttcagcaccagctcagagctgcggtttgcgtccgtggtgaaccaggagagcgagtcactactgctgaaatggttcagcaggcacaaggcgccaaagtccatacaatagatcaggaaggcgtcctcagccggctcaaactcaggcgaggcagtctcggccagatagaagcagttgacctgtcggttctccagcatttgggacaggtcgccgtccagagtcgatgagtcgatccccttgatatccagcagccggaccatctggtcccgggttgcgaaaacgaactgggaaagcatcttcagaacctcaagagtcacctgccgattctgctccggcagctgcacgaagcccttgatcagggtgtattcaggcatcgtctttggctggctggactcatgatggaacacctgctggtagaagggcgcaatgtgtagattctcgccgtcagcgcatgtcacatagggcatttcactcattttaagtcacactccttacaaaatgtatatccaaaattggtacccaccagagaaaatccggtgctatgacctatatactatgcaaatcgtcctaatcttatttgcacaaaaaggcctccccgaagggaggcccgaaaggactgatatcaggatacacggatgatccggccgcggatgcggggaggatcggtaggacgcttgccgggagtgacgctctcgatcttaatggagacgcgtgagttctcctcaatctccagatcgcggggcatgggacacagggcgtcgatgcccagctgcaggttgacgaacacgccggtgctctgaccaaaattggcgatccggacgacattgcccagcacgatcgtgtcaggctcaaagtcgaaggtcagaggcttggtgcgatgctgcttgtttacggcctcccagaagatgtagccgtcagaggcggagatctccttgcagcggacctccaggcggtcgcccatcttcatatactcgcggatgtcgctgtggtcggtggtgaaatcgctgttgcggatatgcccggtcacgccgcctacttccacatagccgccgtaacggctgaagccaacgacctcaccctcgtagatacggccagactgcaggtcctggagcatgctggtcttcagcagctcctgcgcccgcttccgggaacaagtcagccagcccttatcctcatcgataccgcaaatgacaaaggggattcgccggcccatcaggttcatcagccgcaggttggggttgtcgcagtcggcctcaggggcgtagattacgcacttttcgccgccagccttgatacctatatccaggttcttggccagcgtcagcatcatgtagcccatcccttcctcagtccgggccagccgatctactgtgccccagcagatggtttcatctgccatcagcttttccagggcggtacggtcagtattgaaaatcttatccattccaaatcactattcctttcttcgtttagttgttagcctatatgttttgtttgtcggccatgaggcgccgcaaggcaacacatgcgcctcattcatttggatgttatgcacttccgtttatgctaattgacggaatagaaaaactacaacttccgtacaaaatatgtgaatatccggccatgttctgttgtataataagaactgacaaaactgcataggaggcgatcatggcaatggaagcacagggctaccaggtggagtacgagggacagatgtatcattcgctgcgggaatttgcggaggcgctcaacctcaactacccaaaggtaacagcatatttcaggaaaggaaaatcgttggaggagatcatcgaaaaatgccagttctcaacggccagcaaaacaccagggccgctcaaagagggtccaaaacgaaaatttgtggaattcaacggggttcagtattcttccatctatgcagcagcggaggctctgggcatctcacctgcccgcgtgtattcggtgcgggagtctcagcagtgcagcgcagaggcagccatcgagtatgtgctggaaaactcgatgccggccggtggcagcgatgccccatctgcggccaaaccatgcatcattgaaggtattagctatccaagccgggaagcagccctggcggcatttcggctcaagcgaataaccgtgtattcccggatgaaacgggagaatatcccatttgaggaagcggtgctaaggggccgggattcagccctataccgtaaaccggctgccagcaaacttccgcggctagtcctaatccccatggaaggagagctcaaaaagccggaggtgctggccgacctgtaccggtctctttcctactataaccgccgggtggagattctgatggacgagctgtcaggtacgccggtgctgttcgtggatggactgtcgtacatctgctacaacgaggatgccagaggcatcgaaatgtcaacagctttcgatgagaaggccaaaatgagttctgcggctatcaacctgttcaatgagaacaatattgcggtaaagctgttcttcagcaaggcgcggggccgactgatgcttacggcgtttcagtcggcaaaatcggataatcagagaatcgaaccgctgctcaatgcatggttttgctattcaactatccgagacgagcgaatgcggaaattcaatccagagcaggcattagctgtgccggagaagaagttacctgcccctcatgtgcgaggcaatggcgctgataacgaaatcaaaattctccctgctgtttctacagccgaaaagacagagggggtctagcgagcaaaaagtgagtccggtctttcttaacggagaaatatggcgaaagaactctgtatacctaaaggccattgcgcatcatatatggtccgtgaagtatgctttcttcagagcgaaacaaaccccaccagaaaagtatctctggcggggtttgtttcgtgtcaactttcgatagccgcagtttcctcaggaagagtttcctcgcttggcatatctccccctgttggagtctcttcttccacaatgaactgctcgataataggaggttggtactcggagttaggaccgatataaatgccttcctcgttgtaccagtcaggattttcctccctgctcggcacgccatctggcgggctgagatagcagacctcatccaggtcagagcggtaggggatgttcggttccagctcgttcttcaggaatgccttggtccagttgttggagggcagggtcccgccgatatcctgtacggagtacggcagccagtagccggttgggcccatgacgaccgtgacccggacctggtggccggtcacaactgcattgtaggagcggacatcgtaatattggacgccggtggcatcggagatctcagccagtttttcctggggcttgtcgtagacatactcgctaagctggatgctcgaccctgcggctggggccggaaggatcagcgaagaccaatccagaaaggcgtcgatcttcatggtaatgggagcccaaagagtggccgctgccagcgtttcagggtcgctgaatacctggaattgcggtgcgggaacatcaatggacttgttgaccaggttgatggcgatttgcgtatcgcttctgagcagcggaaacctgccgctccagtcgtctatcgcctcatcttccttgcccggagtctgatatgtggacatctgctctctcaggtaatcgtccagcccggaaaagtcgcccgcattcagatacctagtaatattcttctcaaagatagggatgtcattctcagtgaccggaggcctggcttcaaattcttcccgaagctcctctttggtggtaggctcaatatccttgagtgacccagggtttttcagccccaggaatccagaatcttcatcctggctggaaccaggaagaatgctcaggtcgccacgcattgcggccgttaccgccccagcaatgatgacaacaatcagcagaacggcgacaacaacaataacagcaatctgctttttgaatttagtgtcggctaggctggccttcgatttatcatcaaaagtatcctgccaacgatcattctgagtatcaaacatttctgttcaccttgcccctcaaatcaaatcgtcatcgtcgatcagcgggtcgccagacagatcatcgaacctgaaatcatcctgaggaggccccttatccgtcatggggctcccaaagaagctatcatccatggggtctgggtcgtttcggccgttgtcaaagattatatcttccgggaggtcgctgccagggggcggcttcaaagcgtcttctgcaagctcctcctcaccaaggccgaggtccgcccccgaggccggccgaggcacaggccgagacgcgggtttctgagcgggagcgggggcaggatcggagaacgggtcgctctgggggctgttgccaaactcaaagtcctcgattttatcctccggctgcggtcggatgccgtgttccttctggaaccggtattcatgggggacaatctcagtatcaattaaatctttgagcatccggtcatattccttgggcagccactgcaccacgccgaccttggccggttgtaccgagttgtgtttgatgagactgtaggtcagctcgccaaagggccgcttcatgatggcagtggggctgaagagggcctccatcttcttctgttcacggatggactcggtgggatgccccagccggtccagacctcccgtgatcaggttgaacttcttgtgggactcgctcttgacaacatcaacggtctcgtgctcaccaaactgatctgagtagtatttggcatccacgaacgatacaccagggaagatgatcaggttacgggcgttggtagagaccagctccacgaagttcttgccatcccggccgccgcccatggcaatctgggcacgggcctgggtcgccagatgtgaggctacgcggtaagaacggccctgagtcagcatgtcggagaaaccaggcgtcgaataagtctgaaactcgtcgatgtagagaaagtgcgcccggcggttatcttcgttgccaggccggcggaaaacagccgactgaagctgcaggatgatgaagtagcccaggaacttaccaaggtcacgcatcataccttgggctgtacaaatacagataacaccgcccttctccaggtgctcatcaaagtcaatctggttgcgctgtcccttatcaaagtcaggattcaggatgccgcgcaggtaccggttggcgataaccttggacacctgagcccggatgccggaggaattctcatacaccttggaccgttcagcatagtattcgttgatgaaccagctggcaatatcgacattttccttctgctcagcatctgtctcccccttcaattgcccaaacctggtgaccagtttacgaccatcctggttaggattctggaggacggtgttcatattgatgaaggttgcgtatttgccatcgacgccttcggatctgtctaggcgtttcaggaccttgagcgtataacggaccagctgttcggacaggtccttaaagtactgaggagagtcagggttcagcatcaggaaggtggtaacagcattctcgatgacatcgtcctcatcgcctaccagcgggttgaagaaggggcaattatccacgctggggtcaaaatagatgtagggacgcccagccaccttggccatcatcgccacctcacgggccagatctcccttaggctcgatgaccgttacgccggcctcaaaattcttgatgtcctggtctaccataggcagaataacctgagaggttttaccgccgccggtagggccaagaatgagcatgtgcaggaaccggtctttatatgggagtatctcccgcggatccttggctccggcctcaaccaaatctttgtccttacacaggatgatgtcgcctggcttataggaaggatcttcacccttgcccattttggtgcccacctcagccagcatggtccacatacccttgcccatatcgctcatctggaaaacggtgaggccggctgtgccgacggccatgaaggccatacccacaagggctgcgccgccactgccgccagccgcctttgcgatccagctgtaaggcaccaggaccagcaagcagatgttaagatataaattgatcttggaccacagaccagccttgccggccatctcaggagcgctctgtccagtaaacatataccagaccagggagacaaactccaaaaccatggctggaaggaacatgttcttgaagaacagcaacgacagcaggacgcaaagcatggagagtccagcaagaaactgttggccggtgactgaaagctgtggaccggcttcggcgaagaaagcattggctttttcagccatgcctttgactttttcaatcatgttatatctaatctcctttcgttgagattcttgtctttataatcatatgcaggttgcccaatattcatttgcggaatgggtttggcgggtctaatgtctttcttagcgaagaaatgtggctggtggggctcttttttccctgatggcattgctgtttcggctccttacagagccgatgccgagtccgtgaggcttctctgttgtgcggaacaaacagctgcggtcctcgttgcacaaaacaaagagcccagccgctagtgcggcagagctctttttggctgcccgtcagggcaggtcaatatcgaattttacagtcccctgagggagccaaacaatatccttctctacatggatgccctggaccttgttatggtcggcatcgaaatagacggtccccttctccacgaatttcttagagatcgtctcgttcagaccggtgaacaggtgctcatcctcagcggcgtcgaaccgcttctgtagatactcttgcagggtggcgcaggcggcgatttcctttttggcctttggcgtcatccgcaggtacagcggatcggttaggctcattactacatcgaaatggcaggggttgccgttccaatcgatgctgtcctcgacccggtgccgacgcagccgtcccaggtacatgtactcggtccctttgggatccaggtagccggtgcccgggacaagctcttcctgcttgaggtacttgtttttcttgagcggcgcggcgggcgccatgatattccccttctcatcgatgaggttgggtggagtcttccggcccacgaaagaggcgccaggattgatccgcaaaatgccgatttccggatagacctcccattggaaagggtgataggtactccgtccatacgcagcaatctggagcgccacttcagactgactgaagtagtcttcgttcaccgtatacttgatgccagggatgtacaggttcgtggcggcagtcttatggaactttccagccttggtgagcggcagaagtgggaatagttcgtccagtttccctggcttcagcagttcttgaatagccagttccaggcgcatgattcgaacctgtgcctcctgattgctgatgctggacccttccggcttctcctggggcggaccatcgaacatttccttcagccattcgatggaagtctcggagatcccacatcccgtatgaaacagccttctctcgctatacgcaatgtacagttcctggcctgggtattgcacgaactggaatcctttcgccttcagctctgcgagtacttcttttgttgccttcatgtttgttttcctccttaaattgttgtcacctacgaccaaatcatgtctgacttggtgtccacgcagtcctgcaggatcgccttgaagtcggcaaacctagcgcagtccgggcggccgcagtatccgtacaggatgttgtcgtcatagtcaccgataaccttcaggatattcttgcaggcgccgtaacggatgcggcctcctacatcagtttgaagcaggaagtcgatgattttgatgtcgggcctcttggtcttgtcctcatcagcgagcagttcctcgatgcgagcgttgatgcgggcatcgaactcatcagccgcttcggcagtgcagccaggataccagctgcagacctcctcatagatatcgtggaacgggccgccctgcagctcagagacctttcgacgcaagcgcaggaatccgccgccccccatgtcgatggtgcggccagttttccgacaggtaatgctaacccccatggtgttattcctcctatttttctaagcaattttcctgaattgggtgctgtgttgttttatgcaggttgccttgaggttattctgctgattctctcgccgaactaaagttcgggagctccctgtaggctccctgtagggagcctatgtgggcgacggtctaggtggatgtacaatcttttttaacgaagaaaactggtggattggtcttatttgccgggcctccggccgcctcgttgtttcggtttcctccggaaacctgtgttgggcatgcagattggcactctatggtggtgacgctgcaggctgggtgtttgcacaaacgatgaaggacgggagtctcacggaccaggcataggctccgaaatggagccggcccgcagcgaaggtcctggtaaaaagaaagtcccctgccacattttttcgttaaaaaagatcccctcctccctataaaaactgcgactccgttgtcgtacaaaacgatttgcccggacgaaacggtttcgtccaaactctttaggaagatgatccccctgtctgatcgcagttttctttttccgtgccggactcatcggcctgaagtccaaagtcgctaaccgcgacaaagaccgggacatggcccgcagtgcaaagctgaaccagatctcctggacgcagtctttaagcacggcctgagccgcccggcggagcagcctgcggcttgtttgccagctgctgatgcttgaccttccggaggtctgcctgcttgtggtagaggtaccgcctgtgcagttccatctcccggcactgtttgctctttacccacttgcgtttgctgtggctggcgagcagttctctgggcaggcggttcctggggatgatcttgtcgaacataccagggttggtagctctgcgggaccggtccatggaccggttaatgcgccggatctccttctggagattctgggcgccgggagccagctccaccaggcccagaacatcctcgccgcagtaggccagcgtctgagaaccaatgtccatgccgacgcggccctcacccatcgggtggagcagttcgcccgtgtcaggcttagcctttacgggcggcgctcccttcagcaccagctgaaggaaataccaccagccctcaggatacgccttgcgggtgatccggcagtagcagatctcccggctcagggcctcggcctcgtagccgcaagggtccttgcggctgcgcttgacccggatgccagtcttgtgtcggccatgtactgtttgatcgtttctgagctgacctcacccgccgtagaggcaaagtagctccgcgtccacaccgactgtgccctggagagctccgaaaactccctcagcagcaccatcgccgtgtttgttttgatgatgcgtaccgcattagccgcgctgatggtaggcggtacatagatcatgctcctatgtgccccatgggcctagagacatgttgttctcatctcccctgctgcgacgaacgattctctgttccaccgccttcggcttagcagcagggaccgttctctgcaatcacgcaaccagtaccccgctcacccttcctcccctgcggctgtttcatgacttttcatctgcgtctgctggtacaatctcatcgttccaccgctgcaaccgagacagtactacaacatccattcgttccaaccttcagttctctcgacctccctcgctgcgacatctcgatgctgtactttagcccgctgaagcaacctcaaagagcttactttagtcaactaaagcgggctcaaaacgactaactttaactaactaaagtcagcttcaaaagcaagtactttagcaatctaaattaaaaaaagagggttcccactggtcgccctcgggccaccccccagaccctaccgggtcagggggatgaaccctcgggctcccacgccgctcactccgctttgctccgctctcggcgtagcctggtaacatcgggtgagggtgcaggcgttctgcagtgggcggggtacttctcctggtaacctgtacgccccggtggatcgatagtcactcgtgttcatcgaggggagctgtctcacggaccacacataggttttcgaagaaaaccggcggaggattttgcctttgaaaggatgaacacctccggagattttcttcgttaaaaaagactggatgtcctgtggtgacgcgatagtgctggaaatagcagtggtcgtgcggcacagacgcagcacccccttgccacgaaaaagaagcagaatactgctgctctttcgctgcaagggggagtccgagacctcatttgatctcgtcagcgacgattgaccaacctgctctccgcgtcatttctgctccacgcgaccattcccgagcaggctcccccggctcatcaccggcagaaaaccctcctggctaatatttcatctggacagccacacccagctccggggggttttcgaatcgtctttcccatatattcctcccagcgagattttctgcagcggctccgccagaccagcactccatgtactccgtcaccacccatgtcggcgtggcacagcgtttccgtatcgcagcacgagtgcgcccttagctgcgccgccagcaatgccggcggatttcgatatacagcagatccgctttgggtagggttggaccaggaaatgatgggtctgtttaacctggcaagagcctttgtattccctgcgctaactgcgttgtcttcctattaccaccgaaaccctaactacagaaccagatcttccatctgcccacatcggcaaatctgcagccggttatgtttcgactactacactgctattatatgcagttgccagtcttcgcattccccagtttcttcctggacagatgcttctccggctatctgtatatatactatgcgcgacttctttttcgtatttccatttttaattgttgtacacaacagagaaaggttttcacttcgaaatattgcgaaaagtccgttcttctggaaacaacgcttccggaattccccctaaaaatattttttcgctgagttcctggatattgattatgagttcgctgttgtatcatacattttgcgtttgcaatatggaaaagttataaaactaaaacaaatgtcacaaaactatggctatttttatgacaaaaagttgtaatcacgcatgtttctggcgtcctatttctgggccgtgaggtctgtcaggaatggtattggacaaatgagcatattatctgcccagaaccgcaatttggagtcaaacatattaaaagggggaattacatatgggaattaagaaattcggcgtcctgtacctggacggaaaaatagtccaacccggcacctcatgttctgacctagtctccggccaaaaaacggtggagcggatcgttgcattcggcgactcgcagtcggaagagtctaatatcgtctgggtgcaggccgacaacttatgggtagctatcaacagctatctgttgaacatcagttataaagagctggaagacacaggcctggcccttggccgcgtcgtccgcatcgatggggttccctatcagtgcaggagcctcaaccttgttccctactatactgccgatggacaggtgcgggatgagtgggttgatgtcctggaaaaattggctggttggaaacatatctggccgaaagagggtcaaggggcctgggggggcggctgcgacaacggtggccggcactactattccgaccccagatttggcaaactgaagaactctcgctgcggctgggagggtttccgtaatccggcagttgggttccgcccggttctggagccgttaaaagaggagccggtactaaacgactccctgatcggctctatcatcgtcgtatatggacccgggcatgttctctgcggccgactggtcggggtttccgactacgacctggtcctggagcgggacggcagcaactgccagaccgactatggtgagtttgcctgcgtcgacggcaaactgacggttgtgaaccgggacctgctactctacactcagaaggatccggtctcatcgacaatcaaaaagtaaggaggttatcaatcaaatggagatcaagaaattcggcgccatgtttttggatggattgcgcgtcggccctggagtcacctatgataggtatctgtccggatccagttgcccaaagattacctttgggtcagtccctaatgaggactgctgtatccgctggatcaaggttggcaacctctgggtctccacggaggtgttctgcaccaacatcagttatcaggagctcctccagagtggatttattgagggaaaaccagtccgcatcggcggccggcagtatctctgccgcagtctcgacctgacgcctgaaaccaaagctgggtgtgggatgaacgacaacgagtggacagacattctctacgagactggcgactgcggcaatatctggccggtggcccgcggtggtttctggggtaagggctgcactcctgatggattacagtacatcgcccagccgtcctactgggacatggagatcctgctgaccgccaaaagcgactaccgaaatccggagattggcttccgccctgtgctggagccgatggacttcatcctggatgagtcgctgctgggcaggcagatcgcagtctactataagacttcccatggagttgccgccatcggcggccggctgcgggcgtacaccgactacgagctggtgctggatggtgatgattcaaattatgataaatccgtttataaagacatcgcctgcatcaacggctgcatcgcctatgtggaccgggcctgcgtggacagcgtccagcttgaaccggaggtgccggccacatgaaaaagttcgaagtaaggcggttcggttctttctgggctggcgatctcaccagaacggatgaccggccggctctctacacgaagaataatattctccgtttcggagacagcaccatggacgagtctgtcaacatcccctgggtatgggtgggtgacaagtggatctccaaggccaccgttctcaccaacatcacctggaacgagctcgacgcctttggttttaccagtggccggcccgtccgtatcgatggagacctgtactactgccggtgtccgcacctggatgtcaatcctgactgctgtgaatttaggcaggcggtcaccgaatctgggctgaacaatgatttctggaattggcagggccattacttcatgggagaccggacgatcggcatggaggataacaacggggttgtgttccgctgctactggatggagggtatgtaccaatacctgtccagggctgagtacatggcctgttcagagcgaaactgcttcgtcggtttccggcctgtcctggagcggctgcggccgaagaatcgagacctggtcggccgcgatgtcaccgtctggaccgacacttggaggtttcagggacgcctgaaggagaccaatctctatgatctggttttggatggctgtcctgatccagagatgggcgacggatggaaggagttcgctgttgtagacaacggccggacaatcatcgatttggagaaagtcatttatatgtgctgaaaaatatgaaaaggagagatttttcatgagcaaaggttataaagatggcgtcgggcgccaccagagggtattcaatatgatgaggaagaaggtacctgatatcgggtacacgggcgtctgctgggtggatgcgtttgcctgcatgtaccggctgtacttggacttcatcaagcacgaccaggccggaatcagcgacggctgggagtgccagatccgccagtatatccgcccagtcttccctgctttcgacctgagcgcctacatctatggagaggcccattttgtcgagcggcagatggatgtcttgctcaatatcattggcgcagtttcggagaactatctccaggcgcagctgtcggttgtctggcagaatgccagcgagaagcagctcaccatgaaagccatgttcgacgaaggctggaaggctgtgaccttcggctccgaccagatcatgatggactggtgccagaagaggttcgaggaaggctactggatgggcaacccggttcgcggcattggccctgacagcgtgaagtttccgatgggtgacctgaaggctgagctccgcaggacgccggagggcatggacctgtacctctccaaggagggtacgcgggtccggtctctgcggctgatgtccagagaacgaaaggtgggcgactgccggtggacggaagtccgggcagtcatcccacagtccttgctggaggacggacaagcaatggtccatgggctgcttggcccggatgatctgccgactgtatatatgcgggaggatggcaagctgtactgccgagagtgccggtgtacggtacccaatacggcgaatcatgagatgcgccgggaaggggcctatgcccacagccatgtctgtggcatccgtgccgaaggagaagtctacgacgactgacgagcaaaaagaccctgggctgcgatacgctgcctggggtctttcttttctaacgaaaaatgcagcgagggttggccatgtttgccaggggcttctctgcgggccggttcccggatcactgtctctggcaaaagaaaatctctcgactttagttcactattatagacaagagcacaaaaaggataggtacggtggggattaacccgtcagattttccattcaatttctaccttttcatttgttgcccggatgaccgttatcagtgcgtccaccacctgcctcttgtcctcaaagctgacattctcccagtcatccagatacccggaaatgctttccatcttctccatcggcacagcgtccgcagagagttttgcaatctcattggcaatggactgccgccttgcgtccagctcctcaattttgctgttggcataggagagcaaaacagggcttgcgcccgtcagcgtgtcaagcagcttttcaatctcgctttctacctgtgccagttccagccgctttgcagtcagtttcggggagatttttgcagccttgttccgacctgtcagcgtcttaaaatctttcagctttttaaccatcgccccatagactaccgcttccagttcgtgcagcttcacgcacccgcagccgggacacgccttgctgtccgcatggacggtgcagcgcaggtaaagaataccgttggagtgcgccgacatgagcgcatagccgcatttcccgcatttgatttttcccgccatccatgtgttccgggctttccttgcgggctggtaagtgtggctggcaagcagcttcttccggcatttcagccacagctccgatgggataaacccctcatgtggagccagtaccagcgtctgtccttgcaggtgcttgtgcttgtcctctgtattccccttgccctgatagtaatagcagccgtttgtcccggcaaagtcggcggcatcattgtaaatatccgttccctggcttttgtaaaactcgtatatgtcgaggtcagccatgacataaatcgggttgcggagaataacgctcaaagtagcccttgacagcggcctgccatgataagtacgcataccgtccaccgtcagcttctttgtaatgtcatgcagcgatacctgcgggtcagcgtacatctcatacatctgccggacaaaggccgcttcggttggctctattaccagcttctttgtgcgcaccccgtccatcacataaggctctgtccgaaatccgtagggcgttttgccgcccattttgaagccccgctgacagcgggagtaccatgcgtcctgcacccgcttctgtatcgtttcccgttcaagctgggcgaacacgatacagatattcagcatcgcccgccccatcggggtggaggtatcaaacttttccgtagaggacacaaactctacattgtactgttgaaacagctccatcatgttggcaaagtccagaatggaacggctgatacggtcgagtttgtaaaccacgacctttgcaatcaagccccgcttgatgtcccgcaccagttcttgaaacttcggacggtctgtgttcttgccgctgtaccctttgtctgtgtattccttgcagttaccgcctttcaactcgtatttgcaaaattcaatctggctttcaatggaaatgctgtcctttttgtctaccgattgtcttgcatagattgcgtctattcgattgttcatattgtcgctccttttcttaaaaaagaaacggagctgctgacacctttattataccgtcagcagccccgcaaatcaacgatggcttcggaaaatcttatgccccggcttcctcactctgccgcttgtcggcatacttgcggaacacctcataaagctgctgttccagctcccggcgttttgccgcttcctgctccggcgtgaacaccggggagagattttccagcgtgatttcctttccctgaaaagtcacgacttcggtttctttcttgtatctgatatgctccatagtacctccgtatttagttttcaaagtgcagtgctgctatgctgcggcgtgaaatgttttctgtcatcaatcaccgttcccttgtgtgccgctgctgccgtttcagttctgccagcacctccggcgggatgcggtctaccagctgctgaatgtcgtgcagctcgctttccagctttgcccgttccatcgtatctttcatcttgcctttttcgctggctttggctctggcttccaactgttcattttccgccaaaaggtcgtttatcgtgaccttgtattttttgagctgcccagagaagttctccatctgcggaaaccactttttcagcagggagagggcttcctctttcttctttccggcattcagcgggttaatgccgtccagcgtggcttcaatggctcttgcctgtttggagagattgaccgcctgtttgaacagccgagtggggatatgcttccggcctgttttgctggcactctccccacgctccaaagccgggtacttctccaccatgtaggcgtgaaaatcgtcctgccattttgtgaggctggctctgttcccgattatctcctttgcacacaggcggttgtcctctgtcagcgggacaaagaccaaatgcaggtggggcgttttctcgtccatgtgtaccaccgccgacacgatattttctttccctacccgcccgattaagaaatcagccgccctctggaaaaacgcctgtatctcctttggggattttttcttaaaaaactccgggctggcggttatcagcgtatcgacaaagcgtgtgctatccttgcgggtgcggcatccggcttgttcaatgcggctctgaatgaaatggtaatagcggctctccggcttgacgatatggaaattgtacttgctccggctggtgtcaatgtcgggattgctggcgtactgttccttttgccgttcgtgatgggcttccagcggtcttgccggattgcccttgtgtttttcaaatcgcaaaattgcgtgttgtgccatgaaactcctttccccattccattcctttccgggacttttccacaggaaaatcccgcagaaaatatctcggatagaaagggaatggatagaatataaatcaatctttttatctctgtatttctatataccgtccggtttccgtacttcaagaggattgattatcgtacttgtggagtgcggttttcagtcctccggcgtaccggaacgggatttattgaagtcggtgtttagaaccgcttcgtaggattttgggtaaatgcggttgggttttccacagccctgcttctgaatctctaccagtccggcgtattgcaactcccgcagggtgttgaccgccttctgccgcccgcagtggagcagctccactacctcattgatgggatagtagaggtaaatgcgcccatattcgtccgcccagccgtttttccgggacaggtctgtccggcgtaggataaaggcatacaatacctttgcttcgttggacagtggcgtgaatgtgggggcttcaaaaagaaaattgggaagccgggtaaagctgaccgccttttccggctgatggatataaatggtgtttgtcatatcgtgttttgtggacggttagaaccccgttttctggggcagacggtagtttctattgcctgtccctgttctgtgcttgcaaagccttgtaaatcaaggacttttcagcccctaactgtccacacaagacctccttttccgttcactttctgttttctgccgcctgtgaactctggcggcacagctgggacagtatttcgcccggttggactttgggacgaacactctgccgcagaccgcacagcgttttagctccttatcccggaaaatctctgcttccagcgttccgatttgcggtaagaccgaccagcggaaccacttgcagcagaccgagaaagaaatggcctgggggcaggtgtgggtgtccccctcgtcaaggagcatacagttcccgtcctcatagttgcagcactcccggcggatcagggcgtttgcctgtttcctctgtgccggtgtcatgcggtaaagggaaccgtccggcttgcgctctatgggcggcagtcgtttatatgggttctctctcatgtgttccctccatttttgctttccgttgccgttctctccgaaaaggcttcctacccactcctgcggcgtgttccggtgttggcacgctccccggacttcgggacattttggtgtgcaccccgtcaagtggacagcgaaataatttacatttacgcatgaaaatccttcctgcacaccatatggtgctgggtactatgcagccagcagacggtcatggacttccataggggtccgcacgcccaggccgcgctggaggcggcggaagttgtaataggtgatgtactcctggatcatcttgaccaactgctcccggctggtgaaccgcctgccatagtagcgctcccgcttgaggatgccccagaagccctccatggggccgttgtcaatgcactttcccacccgggacatactctgtgtaatgccagctgcagccagcttgtcatggaagatctgagtggtataggcgctgccccggtcgctgtggagcagagggcgggcgccgggattgccctccaatgcctgagccagagtgcgatggaccaaggcagcgtcgttggtgtcccggatgacaaaggaaacgatgcgccggtcacacagatccaggatggcgctcaggtagagcttgcgtatgttggtgcccgtatagtagtgaaactccgtcacatcggtgagccacttttcgttggggcggtcggcgtaaaattggcggtccaacacattctccgccagctgtcggggggatgatgccgcccgagtgcagccatgtggggcatgttttaccacagactgaatcccaaggccacggcagatgcgcagtgtccgcttatcgttgaccggcgtatggtaatacttgtccaaatcgtcccgaatgcggcggtatcccttgtccgggctctcccggtggatctcctgcaccaactgggcgatgcgctgattctcggcgacgcggcccccggctttcccggagcgccaccggtaatagctggcccgggagatatgcagtgcacggcacgccgcgcctatggggaaaccttcctcttctgcgccgcggcgcaccgcctcgtactgccgctcctgacgaaactgcctcagcgatcccccctttccagctcttgcactttttttcgcagatacagttccattttcagcaattcattctccttcttcaaccgggcgttctcgatccgcagggcctcatcccggctccggggcgtttggtccgccaggcgcttgccacgccggtcctccaatcccgcgggacccaactcctgatactttttcacccagctccgcagcgtctgtacggctacttggtgtgcctgcgccacctcttggagcgtccggccgccctccagacaggccagcgccgcctccagccgttcctctatggtgtggtcgttcctcatgatagtccctcctctttctctcttggagtttctctcatgatacgcctttacccagtccaataccagattcccggagcgcaaatgatacttttccgcgatggccatagaactgccctgaccggacaggtactcctccgccacttggcgcttgaagtcctcgctgtacttccgtttggagcgattcccattctcctccaatgccgaaattccctccgagcgataccggctgatccaactctccatagtggtgtgccccactccggcccgacgcgccgcttcccgcattcgcaaccggcctgcaaggcattcctctaccagcgagactttttcctcgagcctaagctcttttcgtttccccatctatgctccctccttatattattttcttgtctgccttattgggagcataccattttgtcccgaagtccggcgtgggacaagggacgggggctttcatatacgccctgtctgctgatgaaaccagccttgcgcttgcggctccacgccacgcaatcacagccctgttttcctgccgcttcaaatgcccttgccctccccggaggcaaccgcattttcgcagcaacgccgacagagcgtataacacactacactttgcaagcaaagtcgtgtgccaaggggtaagcccctttggaaaccccagacaacaaaataggctgaatatcccgcacttccccggtgcttgatattcagcctttatttgttgtcagcagctcccgtttcgtggtctgccttttgtgtccttgtccataatgtttcctcgttgtccaaaacaagcaacaacgcaatttgtttcccataacagcaatccattccaacggaatagtttcgcacaagcccgcataaaacatgcttagaagttcgatttaggggaaatataaagcaggaaggagaacaatgcacatatggataggagcaaatatcataaattccaccggaatcgcttcggtcatcttctggagaacgggattcctgccactgaaggtggttcagtcacttttgatgatcctcatctggaacttgtaagcgatgtaggtacgcgggacttgccggtagactgggtacagtcctgcggcattctggcgtctcgccatgtattcctatctgggatcacatgggagactctgcgcaaacagggacttgtctatgggcggaagataactctctatggccaggactacctcctccgctgcccccaggttgccaatcacggtgagtgggagcaatttgtggccgctaccagccaagatatcgaatggaggggcgattccagtttctttggacaggagttcattcctggcgacggtgtgtttcagatggatcgctgctcggtggtcactcatggtgggcagatcgtcaatgcccgggatgtcgacaaagccgatgacgctatcgggttcaggatgattctggaaccaatcgacccggagccggtcctggcccggggtgacattgcccggcgagtctctgcctactgcggcgagttccgcctggacggctcactggtcgacttctccgactatgacctggtcattcatctgtggaggaacaaactcatgccggacgatttcggtcctggtgttattcaggatggcgaggtttgctgcatcgaccgccagcttatccaacacctgtcgctgggcccggtctgagcgtcccaaaaagcccccgaaagggggctttgtcatgccaaaaatctcccctcaaaaatatcttcctagcgaactgcatataatataaatagaaaagttgcgtatccgacaccatttgcatataattagttctcgaaagaaaggagctgttttgatatatgaccaggaagaaaggctacggcaatgactcgatcactgccctcaagggcgccgaccgggttcgaaaaaaaccaagcgtcatctttggttcggacggcttggatggctgccagcatgccgtatttgagattttatccaacgccattgacgaggctcgggctggctatggcagcctcatcaccatcatccgctatctggatggctctatccaggtggacgaccagggccgcggctgcccggtagattggaatgagacagagcagcggtataactgggagctggtcttctgtgaactctatgccggcggtaagtacggccgggatggcgactataaatatgccctgggtctcaacggccttggatcctgcgccacccagtatgccagcgaattcatggatgtggttgtagtccgcgatggcaagcggtataccctgcacttcgagaaaggcgagaatgtgggcggcctgcatgaggaaccggccccacgaaacgcccataccggtacctccatccgctggaaaccggaccgcgaggtgttcatggacactgatatccctgcggagtatttcgccgatacggtcaaacgccaggcagtggtcaacgctggtatcaccttcctcttccggaatgagacggagcctggcagctttgaggaggttcagttcctctatgagcatgggctgatcgactatgtgactgagctggccggagagggtgccctgacagcccctgtattcttccagtcgccggagcggtcgggccgcgaccgggcggatatggatgactataaagtcaagttgtcggtggccttctgcttctccaaccgggtgcaggtcattgagcactaccataattcctcctggctagaatatggcggttcccctgaccgggctgtccgctctggatttgtatcagccctggacgcctatctaaaggcccagggtaagtacaataagggtgaaagcaaaatcgccttccaggacattcaggactcgctggtattggtgaccaatgatttctccacggagacctcctatgagaaccagaccaagaaggccatcaacaataagtttgttcaggaggccatgaccgattttctgaaggagcggctagagatctattttattgaaaatcccttggatgcccagaagattgctgagcaggtgctcatcaacaagcgggcccgggagaatgctgagaagacgcggctgaacattaagaagaagctgaccggctccatggatatctccaaccgggtacagaagtttgtagactgccggacccgggacgccagccgccgggagctctacatcgtggagggcgactcggctctgggcagcgtcaagctggcccgggacagtgagtttcaggcgatcatgcctgtgcgtggcaagatcctcaactgtctgaagtccgactacaccaagatcttcaagagcgaggtcatcacagacctgctccgggttctgggctgcggggtggaggtcaaggaccggcatgccaaggagatggccggattcgacctctcggcactacgctggaacaaggtagtcatctgtacggatgccgatgtggacggattccagatccgcaccctcatcctcacgatgctttatcggctcacccccaccctcattcaggagggctatgtctatatcgctgagtctcccctgtttgagattacctgcaagggcgatacctggtttgcctattctaacgctgaaaaggactcggtggtggccaagctgaagggcaagaaatgcgacatccagcggtccaagggcctgggcgagaatgacccagacatgatgtggctgacgaccatgaacccggacacccgccgcctcatcaaggtcatgcctgaggatgtgaagcagacggccaccatgtttgacctgctcctgggcgatgacctgcagggccgcaaaaactacattgccagcgacggacacctgttcttggacctggctgatatttcctaaaaggagggctgtgtaatggcgtccaaaaagaaaaaaccggccgctgagacggcccgggtgagtgctgccgacctgcatgtaaagggtctgaagtccgaagtgcaggaacagccgatcaccgacaccctgaaatacaactatatgccctacgccatgagcgtcatcgtctcccgggccattccggaaatcgatgggttcaagccaagccaccggaagctgctgtacaccatgtaccagatgcacctgctgggcggggcccgtaccaagagcgccaatattgtaggcgccaccatgaagctgaacccgcatggcgacgcggccatctacgatacgatggtccgcttgtccaagggctacggggccctgcttcatccattcgtggattccaagggcaacttcggcaaggtctactccagggacatggcctgggctgccagccggtacacggaggcccggctggatggtatctgcgttgagatgttccgggatatcgaccaggacacagtggattttgttgataactacgatggaaagctgaaggagccctctctcctgcccaccacctttcccaatattcttgtgtccgccaacaagggcatcgccgtgggtatggccagcgatatctgcgggttcaatctgagcgaggtctgcgatacgaccatctccctcatggagaacccttaccatgacatcctctccaccttgctggcccctgaccttcccaccggcggcgagctcctctatgatgagaagacgctgcggggcatctatgaaacaggccggggcaccttcaaggtgcgggccaagtggcggtatatccccaaacagaatgtcattgaggtctatgagatcccctattcgacgaccaccgaggccatcgtggacaaggttgtcgagctggtgaagctgggcaagctgaaggagattagcgacatccgcgatgagacagacctgtctggcttgaaactggccatcgatctgaagcgaggcaacgaccctgagaagatcatgcaaaagctgttcaagctgacgccgctgatggacagtcagtcctgcaacttcaatgttttgatcaacggccaaccaagggtcatgggcgtgcgggagctgctgaatgagtgggtggcctggcgcatggggtgcgtgcggcgccggctcaactggtccatcacccgtaagtccgagaaactgcacctgctgcagggcctggaaaagatactgctgaacatcaataaagccatcaagatcatccgggagactgagaaggacgccgatgtggtgcccaacctgatggcaggtttcaaaattgatgaggtgcaggctgagtttgtggccaatatgcggctgcgggacatcaacaaggagcatatcctcaagcgcaccaaagaaatcgccatcctggagaaagagatccacagcctggagacgaccgtaaagtcgccaaagcgcatccagaacctgatcgccaaggagctgcgggaggtcaaggaaaaatacggtgcgccccgccggactgagatcgttaaggaccaccaggatgaggttgtggacgatgtggacaacggcgcccccagctaccaggtccacctgtttctctcccaggagggctacctgaagaagatcacgccccagtcgctgcgcatggccagcgagcagaagtacaaggacggcgatgggccgggccagcagtgggaggccgacaaccaggatgagctgatggtattcacggacaagcagcagtgctataagaccttcctcagcgagttcgatgataccaaggccagcgccctgggcgactatctgcccaccaagctgggcatggacgccgatgaaaaggtcctgtgggcctgcctgcccggcaattatgccggtgacctggtcttcttctttgagaatggcaaggccgcccgtgtggcactttcggcctaccagacccagaccaggcgcaagaagctcattggcgccttctccgacaaatcgccgctggtaaaggtcctgtggctgaaggagaaccaggacctggctgtgggcgccagctccggcaagacagtcctgttcgactcctccctgctggcggcaaagagctccagggctgcccagggcgtgggcgtgctcaccctgaagaagggccagacactggcctgggccgcgccggtagaggagacgcatatcaagcgtatcgcacggtaccgggtgcggaatatcccggccgtgggggtcaacctcattggtgtggatgcagccgaagattgaacatgagggccgtcccaggcggggcggccctgttttatacgctgctgaataacccgcgggcaatgcgcatagtatctaaccagaatgcacaatctgggagaatcccaacgaaaaggagcgaaaaaacatgggagatgtcagacttcttgggaccgtatatgtccgcaacaagccggtgccaatgggaaagaatgtcggccggtacagggctgacgccccgatcaccatcggcgatacggtgggcggcatggagtgccgctgggtcatgaccggcaggatgctggtagcggaacggccgcttctgcagggaatcgccttccatcatattaagaaccggaacctcgatactggcatcgaggtgcagatcgatggggctgtctaccgctgccggctgctgaaggccgacccatctgaggacggacatcccagcgagtgggaccggctgaaggatcagctgctcccagcctgggggaaaatcacatccatcattgccatgcaggagggcgttgtttcagtctacaatgggcaggctcacccagtcgcctacacttactccccctgcagctggtatccggtgctggagccactgtccccggtcatcctctcggaggaggccattgggaagggtctgctggtctctgtaggcgaaggcgttgtcagcggaatgttggagagtgtcaccgattatgatatcgtgatgtccaaggtcattgccagcaaggtagctcctgagcatatgctgctgattggcaatggaaagatggtcatcatgcgggatgctgtatgggctattcgagaatatcgtagttcatgcaacgcaaaatgagagtcttggcattgtgccaaggctctcattcttttgtgccgtcagaaggtcttttttaacgaagaaatgcggcggaggaaatttgctttgcccgaatctctcgctggagcaggtcccctccggggacccattccgggtccgtgagattgccccgtccattgtttcgtacaacaatggaacctcacggacccgacataggctccggaacggagccgcccgcgtccacggcttctggcaaacagaacaaaccccgtcagcttttcttcgttaaaaaagatttgtccgacctcaagacacccaaaaaagacggcagggagaataactctccccgccgtccggcgcgatatgatatcaggtctcttcgcccttatccagctccggtaagagggattcatccttcttgggcagcttttcgggctccttaggggctttgtcggaggaggcatccaccacgatggtgggtccatccccggctgccagcttgccgcccagcataccggcgatcagggccttgaggtcgatgcccatgccctgggccacgccctcggtcacctgggtggtgccggtgataatgtcctggatcagcttagcgctgttgccctcgccgtacatggtgatcttgtccaccttggacagaggctcagccacattcttggcgatgtcgggcagggcctgcatgatcatctcgatgacggcagcctcgccgtacttcttcatggcctcggccttcttgtcgataccttcggcctcagccagagccttggcctggatggcctcggcctcggctttaccgacggcggcgataccagcggcttcctgctccttggcatacttggcagcctcagcctgggccttgacagcctcggcttccttttgctgctcgaacagcttggcttcggcgtcccgctggcggacgaacagctcagcctcagcttccttctcctggcggtacttctcggcgtcagccttggcgcggatgtcggcgtctagggtctgcttggcgacctcgacttccttctgcttcagttcagcctcgcgctccgtcttggcgatctgggcgttcacagtagccgtctcgatggaacgctgctgctcctgttcctcaatcttataggcggcgtcagcctgggccctcttcatgtcggcggcgaccttcagctcagccttcttgacctccagctccgtgttcttctgagcgatctcagtttcagcctggacgcgggcgtcgttggcctcacggtctgcctgcgcctgggcgatggccacatctcggtcggcctgggccttggcaatggaggcgtccttcttgatcttggccgtgttatcggcgcccaggtccttgatgaggccattctcatcggtgacattctggatgttgcaggagacgatctcgatgcccagcttggccaggtccttggaggccttgttcatgacctcgtcggagaacgagtcgcggtccgtgttgatgtccttgagggacagggtgcccacgatctcgcgcatgttgccctgcagggagtctacgaggtccatggcgatctggtcggcagacttgttcaggaagttcttggcggccaaggcaatgccctccgtggtgggcatgatgcggatcttggccaccgcgtctaccgagacattgatgaaatcgttggtcggcacaggacggtccgtcttgatgtccacgctcatctggcccaggtacagacggtccatccgctccaggaaggggatccggaacccggcccggccgatgagcatgcggggctgtttcttcacaccggagatgaggtaggcgtggtcgggcggcgccttcacatagctgaggaggaagaacacaatgacaaggatggcggctgcgataccgccgatgaggggaatggggatgggcattgaacaacactcctttatatttttgggccgcggtcaggcggctttttaacgaaggatactatgcaggggatctgaagtagtttccccggggcattcacccccccctaattcttcgaattagggagggtcctctgcccctgcgcgcttttatagatggcataggttatagcgagcaggaatttttctacccccagcaggcggccccgctcgtctgcagcctcgaatatcgagcgctttagacagctgtatatcaggatcgaggcaatcgcattttgcatccaaaaccaactcccttttctttaatatctgccaggcagcaggttctatttatattatatgcacttcgcactttttatattttggacaaaaaagagccggagctccccgcaatggggagccccagccttggcgacttaatcctgtttcttccgcaggaaatcctttacgaaggtcagcaggacgaccagcccggtactggcgacaaacacatcgcgcacgatgatcatgccggtggagatactgtcgtgccaatacagaccctgcagccgggcgatcagataggtcaccggaagggctattcccatgagataggcgatgaccgtcagtcccctccctgcctctttagcgcccattcccagtccgatcaggtcggacaggaggtcgaccacgcagatggcgaaggccatgccggccgagaccaccaggattcggggcgtgctgattgcgtactccgggaatgaaagcactatagctgccatgcagagcagatagcccaggcagaggaagaccaggtacaccttgtccgccgttcgcagagggatgccctcataggatttgcgggtgatgccctgttttgccgtaaaaagaaccaggattccgaaaatttccatattattttacctcctaattttgattttgactccaaaattggctgctaaaatttatgatatgcaggcctgcccgtatctatttttgggcaaaaagaaccggagccccaaaaggggccccggatgggatattaggcaggctgcgcaaggcagatatcctcgccatcccggcggaacatccgaggatgcagctgcagttcctgccgcagtttttctgccaggtggttattggaccgggccttggggtgtttctccatttcaccctccagcgcggcggcagtcatccggccgccgttggcctccaggatcatggacagaacagccgcccaggtcatcttctcgctggtccgcacatcccgctgcaggaatttgacatgctgcacagggatgatatacgggtccttcttcttcaggatgaccaggtactcatgctccaggggaatgaacttgccgctgtactggatggtgtcggtcaggcagttatgctgctgcttgatgatcacctgctccagctcgccgaacaggtccatattcttgaacatggagtagtactggccccggtagcgggagtcacccatcaggatggccagccggccgcccttgcggagcagcttgtacaggttggcgttgcaggtatcgaaccactgcttgaacgccgcctggtcgctgatccggctgccgtcatgggggttgatttcatcgccccacatgcccttgccatcggcgcccttgccggagtacaccggcatcgaggacccaggaaagacaaaatagggcgggtggaagaagatgaaatccagcagcgggaagtccaggtcaggtccgctgatgtccacgcccccaaacttggggttcaggtccgaaaagaccgtgttggcgctggtatagcccaggtcctgtgccacctcaatggaggtaccggagcccacagccagatccccgaaggtgtcaggcttgtagtgctggagcaggtcccggatcagcagaccagagcagttgccccgccaggagttgctgccatacttgccgcgggcaaagtaggaagcgatggaggtcagccccttgagaggctgcatccggaaattggactggttcaggtcgcccaccagtttccgcccgtcctcgtactccagcagaacctcccggcccttgcggccacggtccttgacctcgatattcacaaccttcccctcgctgagatagggactcagcttggtcagatcagccgcatttaacattgcaattctcctccttgttttgtttgttctccatgacaggctcgtccggctcatcctcaaccgggggctcgttgtcgccccagcgggaccggtcgaagcccttgagctttacccaacccgaattgtccaggaaccaggcagtgcgcttatggccctgtctgaggacgatcacatcacccggcagcacattctgctgataccgggcatactgggctgccgtttcgactttggcgccaggccgtagcgggccgccccaggaggggtggtacatccggtcgtccacggccagcccccattttttgagggccgagaggggcgccctgtattggtcggaagacggagtgtagacgatgtagcagtcgccgtagtagcggtcgttcagccaccggtaaaaggccgggtagaaggccgccgggtgctcgtcccgccgtctcagccgctcatggaaggcagcctggtggacatcgatccaccgcatgtagtcgaccgtactccagtagttgccggcatgcaggtccatcagcttgaagtagctgcggacaccggggatgtagccaccctcgcggtcagccagccgggctgcggtgatgatagagagagctttcatggtgttcactcccccttctcatagccgccgatcttgatctgccccgtacaaacagccgatgcggtcagcggatcctcatcgggcggcgtgtactcgtccaggacctgctgcatggccgaaaaggccgtctgtgcgatcttgttcgccagctgctggtcaggaaggtccatgacctcggcgccctcattctccaccagagaatccagggcaaacacagcctcgtccaaggtgagagggaccgactgcaggtgcaggacagacagcgtccggaccaccagggcctcagggttgttgcagtgggcattcctgacctggatggccatggccagctgggcccgatcctggccagaggggaccacccgttcaaggacggccagctttcgcttcagagcttccgccgcctcataataaggggtgaaggtaccgggtttgctctccatgtattttttctccatagtagtttcctcctaatatatgtgttcctccaactttggggtctatagcaatcctatgcaaattgtatacgcttcattccagagtgcatttgtgcagatttgaatgacgaaaggaaatttgcttgccaggggaatgacatctttcttaatgaagaaatctgtagtgtgatttttcctttgccgggaggcgttattgtaacacaagtttcttttagaagcctgcatatggtccgagagaactgcgatgctgcaatagctgtaaaggaaatcacttgccatttgccgttgcgctcaacaatggatttcttagaagttgcatacaactattcgggcggtcgagccgaggccgcggctgacaagtagtttgactttcgtgtggctgaatctcacggaccatacataggctccgtgaggatctggccgcagtcgcagctaagacagggacagcgaagaaaacccattactgtatttttctttacaaaagattcgaaagtttttttcagtaacagatggcggcaaccacttgatttctctgccccgaaatacaaatcaggcgttctgcataaaatgtatacagagaacaaagctgcgaggaaggaggttgggcggacttttcttggaaacatcctgggagacagtacgcccgcacagggtcatggatagaaatattgatcatgtcaggcttggcaaatttctcagctatgtactccggtataggccggatacggctggtgtaactctggacagctacggctgcgcacaagtgggctttttcctggctggaaccagcaaacagtatccaattaccagggaatttctggaggagttcctgtccatgagccgccagcatgtccatctttcccatgacatcaaaacggccacggcggtgggacggcggcatgggaacccaatcggttttgagatggttgccggacagatgttccggaagggctatgtattctgcatttccgaaaacgggatttggctgatgaaagcaaaggctgtgcctgtcaagtacctgcaaacatttcctctctgataaagagggctcgtatgatataaggaggcattagaagattatgtctgatttcgatatgattctcgctgcactgattgagctgggacacaaagcagggcagctgactgatactgaggtcctgcaggctttggactgcttggaggatgcagacctgaccaaagcgcaggcggccctggctgccgcaggcatcaagatcgtccccggggagcctgagttcgttgacgatgttgtcgctgacgctggcagcccagaggaggattggggcggcggcgccctggactccttctccatgtacatgcgtgagatcggccggtacccgctgcttaaggaggaggaagagcgcgagctctgcatccagctccgtgacggccgggccgccgcaaagcggctgaaggaggagtcagagaacctgtccgaaaacgagaaggcggaactgaagacgctggccaagactgccgacaaggtcaaggagaagctggttgagcacaacctgcggctggtggtctcctttgccaagcagtatgagaactcctaccacgatctgcagctgctggacctcattcagtctggcaacatgggtctgatgaagggcatcgagtactacgatgtagacaaagggtttcgcctgagcacctatgtgacctggtggatccggcaggccatcacccgcgacattgccaacttgggccacaccatccgcgtccctgtccatatgtccgagcgtctgcgcaggatcatggccgtggagaagcggctggagcaggagcagggctgtgctgtttctgatgagcagcttgctgaggagctgggtatctctgtggaggagctgtcccggttgcgcctgagccagcaggcggtcgtctctacggacactcccgtctcggaggatcctgacggcatggtcctgggcgacatgctgaccgacgagggccccagtcccgaagagcagtttgagaagactgacctccgcgatgccgtccatgaggtcatggagaaggtcctgtcccccaaggaacagcttgttctcaaccaccgacttggtatgaacggcgagtctgccaagacgctggctgaggtcggcgacctgatgggggtcacccgggaacgggtgcgtcagattgagggcaaggctttgcggaaaatgaaatgtaccggcctgcgcaagcggtatatggactatgtctatgacagctatgacgagcagtcttttcggttctaatttggaaacaacgaaggcgttcggtatgtcaccgaacgccttctcttcacgctaacaaaatataaagttcaggaagtgcatataataaaacgaggtgattgatatgtacaagttcgagccgctcacggcggtagtattagtggacaacaatatggggatcggcagtggttctgatattttgttccattgtcgcccattcagagaacagcagatgcgaatattagcgaaccatccggtcatcatgggtaggaacacctatgagtcgtttccctgggagaaggtcccccctgtgttgaacagccgtatcctgttgctgtccagtacagccaggccagatggccaggctgagattttccactctgtttccgacctgatcaatgtctacccccgtcgtgccatggtattcggcggagagcataccttcaaagcccttctcccctactgtagcactatcatggcctgtaaggctgatattgagctgccagccgaccggaaatttccagtggagctgggcaaagataaacggtggaagatttgcgagcggtccaaggtcctgcagggccctcataagctggatgtctcctgtcagttcgtgacctacgcccgggaccccagggtcgagccagtgcgctggccggacggcctggccaatatttcccgccattaaaaagagacgccttgaggcgtctcttagggatgcggtttaaggttctggaagggcgccgatctgagccttgtagtcagccagcatggcggacagaatctccgggtcagtttcccagtaactgtcatccaacagcttctctaaaggcaggtctgtgggccgtgcccccgtcaggacgccgtcctcgaaacggagctgggtctcggtaccctcgtggtcgaaacgcggaaatacacgctcctggacggtctcatcgccgtttttgagggtaatgatgccggcgactgggtaaccggtctcgatgtctaccttggtgattgagatttctccatttcccagatccggcgcgtcagccgcgatcagatccacatagggtccgtcgtaggccatcgtgtgaggctctccctgacagctgcagaggagaaacatggacagggaaagggcaaaaacaagaatcttcttcatgtttgactccacccccccatcaagacatgcccgggaacaggccgtagccgatgctgccggcgccatactccccaaacaactcagggatcggttccagggagcagttcaaatccgggtccacgcagttgagcaggaacaaccagatggcggccatttcctccgggcagtcagcctgagtatccgccgtctggaaatggaggcccatctcatcctcatagagctctgtgttgaacggatagcccagatccttgagctgctggaccacatcagccgggatcaggttgtcctcaaacttgttcgcaaagctgtgcaggtcaattccagtctttgcaatgatctgagtctgcgccttcaggacatcctccatcggcttgtctgcgccggcatggaaggactgggtcttgccgtggccctcgccgaaatagtcgccaatgaccaaattgaagttgtaacgcataatattttctcctttcagttctttatttatgtgctgcagtcctcggaagggacggggttcgtatcttccattggttgtctttcaaccggggccagcccaaggctgatcttcagagcgatgtcgattttggccatatcatatctggacattcggcccacgcgggacactagacgggtgcaggaaatagcccgcacctgctccagcaggactgtctcacaggtgtcgtgatgccagtgatccacatgggtcggcatccgtccctttcgcttggttgtgatcggcgcgacgatggtcgtcgggctgtaccggttgccgtagtcattctggataatcacgacaggccgaagcccactctgctcactgccaaaagtatggctgaggtcggcgaaataaatctctcctcggtggatgagcgactcatccatggccttggtgcgcttggccttgaccaagccaacgctgattttcagggcctgatcgacttttgccatgtcctcatccgacagtttgccaccagacgaaataaaacgggcgccggaaagagtacggacctgctcggccatgacgacggcctttttattcaaaaccgtcacttccacctgagtgggaagacgggcctcgcttcgcttggcgataggggcaacgatgaaggtaagcccctgccggttgccgtaatcgttctgcacgatcacaaccggctgctggccaccaaactcgcagcccatcaccgggttaagctcggcaaagtaaatttctccacgctgcataatataacctcctgggtataatttctccaaaattggggtactgcttaaatcgtatgcagaaaccccgcgaatcattctgtacatgaagggagggtgtgtatatgcccccgaaactccccattgaattcaaactctttgatgaaatgattgaaagcccatgccatactgctgaagacctagtcataggcgctcgtgaattgatcctctcgtcagaggcgactgcagactgtaatgtgacggttgccaaggcatcgcagggttcccgaattcttgttctggccgtcgaccgcgataactatgagttctcctaccggactatggatggccgctggcatgtagagggcggctggctggcctgcgacctgcgtggtatctccgttgagcagctcaagcagatgatggtcgactatctggccaaaggtacgcccattgttattcctgaccggatacatcggccatctgtccagccgcaacagcggcgaaaagtgcggtgagaatctttcttaccgaagaaatgcggcagggatggctttgtttgcctgtggctatggtccaggccggctccgtcccggagctctatactggggtccgggagttctgctcatttgtacaaacaacggaaaaaccacaagccaaaggcgaacacacaggcagcttggcggcaaagcaaaatctcatctggcaagaataccacaacttatgtctaaatggaagagggcctgcatcgctgcagaccctctttttgcggtcagaaacggatcgcctctaccctggcgtcggcactgcgctccgcatggaacttctttatggtcttctcggggaaatccttgggaggattccagagcgttcccttgtgtcgcatcaatccaaagaaccaggacaggctctcgtcgccgccatcggccggctccaggcggaacccctggagtaaatcgtagacgataacatagtacttcttgttcaacttgtgccagaagatgtcgccctcgaatacagggataccctcccagtcagcactcgttttgccccgggctatccagtctcgctggtcggctttgagggcatcttcccagttagtgtccatccaggtcccggagaacagagacaccgtgcagggatagatagaactgtcgcccacactcttcccccaccgctccgggctgtgcagacacagaatcggcatctgaggcttggcaccgtccggcaccggcatcgggatgatggccatgcagccgtagatccatttgcccttgacgaccttgccgtccggttttgtgattttgtccttccctgcggagtccccatggaacccgcgatagatcatcctgttgttgatgttgtaaaccatgtgcataataccccctaatcgtagtgatatgggaatactatgcgcattgccgacaaacaattcagatgagccggactacattggcagggtcggacttcagcctcataatgaggcccatgacctggagcttggcatcgtcagagagggtgttgtactgctggacgagcatctcctcttcgctgttgagccggcgggatggtttgtagccgcggatgccgcagaaaatctccagttccaccccaaagtagtctgccagcgtcttcagcatccggagatcagcctttttattctccctgttgtacagggaatagagggtcatttctgagatcttggtgtcctcatggatcttcggaatcgtcttcttcgattcatccaccagatggcggaacacactggagacggtctcctgttcaatcggcacagccatagttcagatacccccctttgctgaaaacaagaataccatgataagcggccgccgtcaactcaaaattttgcaaatgcacaaccatacagagaactttgcatttgcaaaatccgtgggcagcccctcctgaagcagggacccatttatcgaaaacgcgtattttgcatttgacaaatgcaaaattgccaaaacaaatatataaggcgcctttgtcgccaaattgtaatcaagaaggaatgtcacgcgctttccacaaccgggttctttttgccggccatctttaacaatacagagagttatcaccgcgcataaaaaagaaccctctcccctgttctgcttgggaaagggctctcagctgctctgtccaaagtcccgctggacatccatctcgacggctaggttcaaatcctcctggatggtgaccaagctggccaatatgtatttgcggcggtcttttatgggcgtggccacccgggagacctgctcatagacagcctggtattcctctagtgatagtcccatgagccggcagatagcctcatctctagtataggttcggccccggacctttaactctggtttccgggaatagatgtagtcagcaataatgctgatgaattgctggatggcggcatccgacatggtgatgccgaaggaggttttcatctctggagtatagagctccagctccagcccctcccctatcgattcttctatctcctgcaaagtcattccatctgtccagtggcgccgtctgttgatcgaaggactgttgctaagagaaatgttgttaagggaactgatgatagtagtggtctcagaacccgcggactgaaaacccgcagactgattttccgcgggctgttctgccgtgggctggatatccgcggattgtttcaccgcgggctgattttccgcggcttcaattttgggtgactgtaccgtggcactgttttttgggtactgaacgacgatagtccgtcccttatcggcagcggccatatccggacaatcgttgaggtggtagctattggaggccagccggccattgatgtgtcgctgcacccggctgatatagttggtgtccaccagctgcttcatgtgcttgcggaaactgttctcagacaggcccagatgtcggcagatgacggagaccttggggaacgacacttgcccggcgcccgaatagctggccaggtaggcatagatgaccttggctgtgcaggagagccgctggtcgaacatgaccatgcgtggcagcagaccatagcccgcccccttgaggccggtgaagccgaaagtcagggctcccccatccgagtcatatttctgctcggcaaacttcttggggttgctgacgatcgtataggagttgtgggcgaaccggctgccggcaccttttacctgttccaccaggatgtagccatggtcccggagctgccgcatgccggcattgtacttgttgcgcccaacattcagccagctgacgatcttatcccgggagggaaagactgagtggtcatcgccagccagtgcgcaaagcagtgaatagacagccttggcagcaatgtccaggtctgtatcctgcattgggtatttgcagatgatgccatagcccttggccattacaccttcaatgcgcaaccggtccgggaacttcaggatactgtcagccattttggtccaccccccttctctcttttatcccctgctccaggtcagtcggacatgtctagcaatgtctgaatcaccacagaccgcttggccccgatcagtttcttcacccgtggcgccaactctttcggtttgtggccctcaatgtcaagcagcagattggggcagttcttcttccagagggagaggacttcccggatctcctcctcggtggccgacttcagcttgtactcgtcagtcagctgtttgaggccagcaaccagctcgccacgcgtcatataaacagatggatacgatacgaccattgtcccatctcctttccaattgagaccattttaccaagcatggagaaaatgtcaataaaattccgagaaattttcgacgaaaattcatgagtggggaaaactctgtgaaaaatgtggaaagtgcgaaaacaatgaaaatttgtccgattttgcaaaagacgatgtaaagtgatttcgcttttcgatgctgctttacgcatacagaaattggctttacagccgttgtggagcaagtggttggaggctgtttccgcaggtggtttgggtcagggagtggggactccagcgttttagacaacgatcagctttgttcctggcttggcttcatttgaggcgagcggctgataatgtaaaggtaaaagcctttccggttttgcttcccctcctccatgctgggatacgggtcttttttaacgaagaaaagcagttggggaggttttgttcgccagttggtctcgtcgcagctggcttccttcggacccggcatgtggcgtgcgggacagctggttgttgccggcaacggacagcttgccggcgcaaaaagaagggccccaggttagctacctgggacccattgcatggggacctattccttcaatgccagcctggcaatctttgcgtccaactcctgaagccgctccggacttgcagatttattctcggcccggcggacggcccgcagggcgcgcagagcgccggcgttcttctgggataggaggccggcgtcctgctcgctgatgacgaaggctctgtcgcaggggacggccatcaggttgaacttcgtatgggacattttatatcactccttttgtgtggcggcctcacggacccggcatcggttccggaacggaaccggcccgcggcaagggtcccgagcagaaacaaaattctccgccatattttcgttaaaaaagactcggctccctgccacccgtcacagacatggacatggttctcgccaccaaacatagcaaccagccaatcatagatggaggaccttgattttcctacatatattatatgcgcttgtcgcttcccacattttgaagttagggtagcaacagcctgttttagaaaaatcatatgctattgggcattttgtccatatcgcagaaccacagagacagaaaaagaaccccaggcttgcgcccagggctcttgtatcatagccggaggtcccccccagcatttcggtggatcagggccgatacggccagcccaaaattgtgcgtattagatggggccgttacggacaggggccatcatgaccttgccggtgccgcggtagacattcaccaagccctcaccggacgcggcagaaccgataagagacttgccggaccgctccacggtgaagttcagggatccgctccaggcgatggcatagttgccatcgatcttgatcacatcatccgacagttcgatggtcaccagttcctccttgggcacatccgattccaggcagatggctccgctgttgccgacgatgcccaggttgaacaggccctccccaccggctacggcagaggagaagttggaccgcatgacggccttgtgcttcagcttggaatcgcaggccaggaacaggccgtcgtccaaaaccacagagccgttccactcggcgatgtccagcagaatcaggtgtttgtaggtaggctccagcaccaggatgccgtcgccagtgtactcaggcttgatggccgactcgccggtcacgctgccgcggagagccttgccgaacaggtcgcccacgcccttcacgccggttgtggcgttcacattgccaagcatccactgcatggcgccggcctgcagggtgatattggccttgctcaggtcgcagatgacctggcgcttacgcacattcattttgttgcagaagaaggcggcctctgccgtggccggcgtcacgctcaggtcgcgcaggtattcgacaacgctgaagggcccaagaccgtcgatgatcctgacatcgtcgttgtcggtgaagttggatactttatacattttttcatcacattcctttcagccagacggcagtgcgcccaggattcgttttgctatatgcaggaaggcatgctctcattggcagagctatcctgccgaaggaaatctcccatcgaggaaagcccgaagatttcggcagagctcgccctgctgctcgccgatccctcccagcaatgtctggacgagcaggctgtcggccccatgttccctcgcaaactggcgaaactcctcctccgacatttcggctcgggccgttacagcatccaaagacagctctccgaacagaaactccaccagagccgcagaccgaaaactgtacacgaaaatgtcagcataaatatccaggtcgtccccggacaggcctttctccagcccggccttcatagctttggctcccagcgtcagttttttcatggcatcacccctctttgaaatttgcctcgctgcgggaaactccaccgttgtacacaacagccaagtgcaaaggccgccgtgtcagagccctcacggacccgacacaggttcccgcgagggaaccggccaccggccaccggctttcggcgaacaaaactgcccagcagatttcttcgttaaaaaagacccgtccaactctcccaaagaaacgatccccagggccgcagccgacaatcaccgccccggggagctgtgcgttacttcaggaagtcgggtgtaggatcagtggtatcccagtcgtcttcatccacctgtcccagagcatagccgccaacctgctgggagaactggctccggccggtaggggtagaacgccggatattcctggcagaatcctcgatcatggccatatactccaggtccatggagaggttgcaggttgcatggttgagcaggaggatattcttggtatccagggccagcagccgcttcaggccttcaaagtccagcacaaagcaggccggctcgccctccgggttgtccagctgcacctgacgccagtccgtatagaccagcaggccaagcccattctccatagtcagaccaagagccgggtagttgcgggacgggtcattgatacaggcagccaggaactcaccgttgaccatagattgggtccaggtgtactcggcctccatatttccatagccggccgcagcctgctgcaggaagtagaaggtggcgccgttgagcatccggttgcgcagcttgtgctcggtggtgggccgcccatcatagtcaggcagttcctcatccaccaggtcggtaataggcaccgacagcgaatcatccagaaggatgtgcgtgggtccatggtcaaacagccagagcagagcatcctcacgggctttgccgtccggcagatcctccaccacaggcttgaacccctccgccatcagttcggcagcctgcgcacgggccttgtcctccgttgtatagaacaacgcctggtaggtttcattttttaccaccaggtaagggacctccatcttggtacggataaaggtcagcggataaccggccttgattttatcaaccaggatccggtagccatgggatgtgtctttaagagcgtagggcagcagaccagccagcccctcttcgctgaaaattctgtacagatcagccattgattaacaggcctcctttcattggtgtctgaataatgtcaactgccccgacccgtaatgggtacggggcttgctggggataggttatactatgcgcgcatcgcaaaacctattggcgaaaaaaataccccctctcgaggaatcggggggggtgatgttaaaccgcccctaaaggggcgcggtttcagactgaattgtgccatatgaacatcgcccaaaagtaattgccaaattgtgcagggtgatcgatgggtagggttgaacatcttttttaacgaagaaaagtagcggaaaatcctcctttgccaagagtttttgccgcgagccggttcctttcggagcctatgtggggtccgtgagtgctccgcgttcccaactggattcttctcccctgcccctggtagttcgctgtcgcacgcaacaaccagctgcaaaagaggcatcctcacgaaccctaaatcggctccggaacggagccggcccgtgccatgcaatcggcaaaaggcagaatcctccgctacttttcttcggtaataaagattctcccatccgctcaatccagaaaaaccaccttcctcaccacccacatccacctaaaatataaaaatcgcaatctgcatataatataagtgaaaggagctgaacatcatggcaaaaattattcgtattgtatcccgtcgtcaggctcacacgggtatcgcctgtgtcaatgagcgcagcatcgttgtctggggagacgctgcaaaaggagatactgccgaggcgcttatggaggctctgtctgatgctcagcagatgctccggtgtcaggcgtacagcaagtccaacgacgatatcatcgccgaggtttgcgacaagctcttccccggaaactgggcctttaccgctcagggcggcaccatcgagttttaagttttgtccccaaaatggaaacttcccaatttgcatatcattgggtagtcaccaattttggggacaaaaatgtataaggagaaatgatacatggaaattatcaagattgtttgccataagcgctaccccgaggacgccatcagcaacctggtagctgttctcagcgccatccatacgggcgagcgggtccctatgcccgagatcaaggatgctgcgctcaacgctgtagcggagctggagaaccggttcggtcctgagagtgccgctgtccgcgccctgatcgaggctgaggagttcgaccatgttaaggttaactttatggtctctgatatcgagggtgaggccgccagcgtctactggaatatccacgacctgcctgccagcgccaagactgaccgcgttttctggggagatctgcttcagcgcacggacgccatctggcagcagatcaagaaactgcagaaggtcgtggagaaccgggagaaggtcgctgactccaaaaaccggctcaaggctgacgaggccgtcgaaaagatggtcaaggaagccaagggtctgtctgaccaggcggccaaggttctctttgaagccgctccctccactcaggaaatggccagtctgcagaagcggatgaacgacgcgatggatcatctggagaccttccagatgaactgtctgcctaaggtgaccattcccggtgaaggccagttctgggtctgtctcagcaaccgtgccaacgcggccgtccgggaactctcccggatggacgaggccatgaaggagaagtccaagatagcggacaaggtcgagctgaagatcgccaagctggagctggcgtgtaaggagcagatttccaaggtgaaggcctgtatggaagccggccctgctatcggtctcaagtccaaggatatcctgtacgcaatcagcgaggtcgacgaccacgcttctgagctccacgatgcgctcgtggaaaagcgcgaggcagccatcggtcccgtaaaggagtactgggccagctgcgtgaagcgggtttccaaggcatgggctgaaatgactggcgccgaggatgagctgatgcttatccttgacaaccagaaccagaaactgcaggccgtcgataagctgtgccagcagggcgggcaccttctggacctgtctgggcgcatgcttcatgacggtgccactgtggacaccctgcgtgggatgtgcgactccatgaaggaactgagtctccagattgagccgctcagaaagggcattgctaatgcccacctcaacagcaagggcgatgagaagcagttctggcatgggcagttcgacaaatgcgttggtactgaaaagtccctccacatgcggatgacccgcatcgaagaggtgatcagcaccaagaatgcggaggctcagcgcgcgcaggcgcagagggggcagaccaatcgattcgccatgcggatgcctgaaatctgcaaggagaacaaccggctttccgatctggtcgccaaggccatgaacgacgagaagaaccctgcttccgccaagcggcagctgttgactgaagttgctgacttctacaagcagtgcattatgttcagcaacaagctgtgcggctatctgcggaactgcggcgactctgagtatgaggcgatccgggagatgctcaattgcatcgccggcatccgcaggaactgcgttactatgaccagcgacctgcgtaaggccctggctatggataagggcatggagaagctgctcagcgccatcttcgatgcccccgaggcgaagtctcagacgaaggccaaggcggagccgtccaaggttgagccgcagttcaacgccgacgccgaggttcagtctctcctgggctgtgcggacaaggctgaactgctggcgaaactgaagacccttcaggaaaagctgggtgcttaacacccaaaggggcctgccacaaggtgggcccctttctgtcaggaggaggttacattgattggtaaaacacatttggccggcgggctggctgccgctgccgtcatctgtcaggcggtgaatctgccactggccgaaggactgattttcacgactggctgcgctgtggggtctctgtttccggatatcgaccatgagagcagcacggtcggtaagagggtcaagccgctgagctctctattgcataaaacggtgggccaccggacgctcttccattggttcgttccctactgcctgctggctgtggttttgcacctgtggaagcccagctgggatgtagtgacgatggctgttttgattggcgtcctcactcacctttttttggatgccctgaatccctccggggtcccggtgtttccggggttgaagctgaacctgctgaaaatcaaaacagagtcaggtttcgacaaggcgattgggaccctgctggccctggttgctgtggcctgctttatttactggattttctgtatgatccgtggctattagctgtacaaaagccctctctcctatgatggggagagggcttgctttttgctgtctgaatggatttcctccagcgtgcatatcatggaccagctgtccaatgaggatgtttttaaggcaaggaggaatgagctatgatggagacagtggctgttcctgaggtgcagaatgtctgcgctgatcaggagttcaacgagtatatggagcaggaaggatctaagatgatctggtcgcttatccaccgttatgggaagggggtcgagaaaaatgacgcctttcaggagatgtccatcgccctatggcgggcactcggttcctattctcccggccggggcgtaaagaagtccacctatgtttaccaggccatctacaatcaactgaagatgatgctgcgggaacagggggccgcaaagcgcgccttcgagaaacaggcaaaatctgctgaagagcagtataacctgcgagcccgggatgagaatatggaggaccgtattctggaggatctgattctgcggagccggtccaatgctctgcattgggcaatccggaacggagggctgactgaggacgagcagaagacggtctacatgctccttcaggacatgctccagaaggagattggcgaagagctcggctgcacccagagccatgtatcgattttgaagaagagagccctgaaaaaaatcgggaaggctcttcaggatgcgcagtgggatggctcgggtatctgggatccggagtctatgtaacaaactcgaaagaggggcagtgtggaagcactgcctctcttcatttttaagtattaaaatagctttgttaaaagctgcatagtattagcaagaactcgatttggggaaattctgttttaggaggaattgaagccagatcggggactttttatttttcggagaaaaaatatatggcctgcttgacagaccgaaaggggaagtacataatgaaggataaaaatgtttacagcgagaagatcgccgttgggtatgagtccctggagctcagcccggaggctcagcggtatttggagaccgatgggcgcaatctgattgcagcggccatgcacagagaagattggtatggtatgccttgggacgatctgttccaggagtgcatgatcgctgccacgagggctattatccgttacaatggggcttggtattgcaccaagatgtctacctacattactaaggcagtagaaatggctatccgggtggagcgccgccgacttgccagtaaaaaggctgcaactcgccgcaatgagttctccttcgaagcatccgagatcatctatgatgactctgagcgcatgctggataatatcatgcggaaaagccgggtcgagtggctcgactgggccattggcgattcggagactgggctcaccgacgaggaacgccaggttctccagtatgcccggaaaggtctttctcagacagagattagcaaggctatgggctttgtgcagtctgaggtatccaaaagaaagaccagggctgtgcaaaagctgcgggaccggttggggaaaatgatcgaggaagggacggtgacctgcgtatgactgtccaggagaaattttacaagatggaggcctacggtcctaagaaagagcccaggttcctttactcgaagcacaacctgcatctcaagtacgggactgagagtgccttcgagattttggccagccgaatgctgacgctgaaggagtttggctacaacccgagtgagcgggctctgacttctgaggagaaggaggcggcccgcacactggactacgcggatgcgttgctccgtacctacgatgatcgggtgaccgccgccgccgagcacacaccatacctggattcgctgaactccaggatggagccgaactgcgactggcctgagccgactgacccccgggaaatgtgcaagatgttggcgcatttctgcgccagtattgaaatcgttcaggtggtcatcagcgactacggagacgaacagtacccggagttcatccgtgcctggtataaagaagttcgccagcggatgcacaaagaccattatgactacatccattggcgcgacatgatgaaagaagtcgccgaccggtacgatgccatgggatcctgaaaaaagaaaggctgagagcttttgctctcagccttttgttgtgtcatacgcagcgtctcttctccgcctccttctgcaggatggccgccagaggagttttcatggtgaccttccccagataggcaactgactccccggagtctatgtcctcgtatggcaggtcgcagtcggtgacaacggcgccggtgcaggagacataaacctcatccaccgccatttcatcattggattcctcgatagacagccgggtaatagttcggtcgaacgacccagggatggatacgccacggccgcgtgccaggatatactcccgcttctcgttttgcatcttcatcttggagaagaagccgcagcggtagtaacgcagcatattcgcagccaggatgtcctcgtggtacctgtccccggagacggcaatattgaagaagctgtactcctcttcgtcgtcggcgtgcgtcaggacccactttaccggggagatgaactggtctccataggattgttccttctcccacagtcggcgcacacagtcgaccagctcctgggagtagatcttgccgttggtggccacaaaacaaccgtggacagggatcttgtgctcgatcacatagtccacgacggccttaatataggccgtgttcagagccggctcgccaccggtgaaggtgatggtgtcgatgtcgtcgatcccagcgaaaatcttggggatgagggccaagtcggcatccatgttctgtgcatcgccccgcaggcagtgctcacagttcatgttgcagcggcgagtcacttcaagactgaggttgcaaactttcagctttcccatgatatatttcctcctagattgtattttctccttaaatctgtatgtattccaaagtggatagctgttggaatagtatgcaggcaggaaagatacaattctgggagggattttcgagtcttttttaacgaagaaatgtggcggaggatttcttcggctgccagtggcgcttgctggttccggctccttgcggagccgatgccaggtccgtgaggcttgcgtatcgttttgtaccgcacagaccaggcaggcggccggtctgcaacgggcacttcgttgttgtgcaaaacgatggagttggaaagcggacaggatatgtacgacaaaccctcgcaaagtcggcaaggcggcagaagacccgcaaaagccgtcaagccaggcgacctcacggacccggcatcggttcccgacgagggaaccggcccgagccatagttttcagcaaacaaagtaggcctccgccatatttcttcgttagaaaagattctcttccccctgcctgtcgccacaaaagcaaaaagcaaggccgcccccaaacaggagcggcccttgcctcaatcgtcaaactcgaaaatcacaggcccagcagggtccgtggatgccagcgcgtagtcgtagtcggcctcgcatccatcgaaaacctccggatgcagcttggcgtgctgaaccaggcttgcagcctgctcttcggcggcttcggtatcgccatccggcaccgagaatgtcagcttggcgatttgggtacgcttgatctcgacctgaaattccattatgcattctcctttcgttcaaatacaatctttcctcggtagacgattcgggtgatatccgagcaatacagcctgccggcctcaccgctcttcacgcccaccagggtcctgagcagctgcttcccctgcttgccaacgcagaagtcccactcattcaggtggtcccgctccagcagattcgtcagcagcttttcaggctccatcttcgatacagcgacatgcccatttttggagaactccacggcgatcgatttggcctccatccctttcaggagcttggcaatctccacctcccagggctccaccaggtcaggctcagccatcttttcccggagatggaactcccgggtcttctcgaaagccaggtcggactccttcttcttacagtgggcgtcaacgatatccttgagatccatcctccaggattccagggcgtatgcctggctcacagagatagtgaatttagggcgccgctcccggataatggtttccggggtattcagccccatgagacaggaccgggcgagtttccagatatcgtttagtctccaggtatcgctggccttgatgtcggccggcttcagagtttcgtagaactcgtccaccatctgttcgccttcctcctggtacgcaacggccttctcctcaatacagacaaggttcttgggccactcatcgtcagacaggaaataggaaactggcatacttatgtagacctttccatccgtcaccatggcgacaaactcggcactaaaaccagggattctggcgtcaccttcgccgttgtagctcttggtctcatagacgaatttggacttgctgaccctggtctggatgtaccagtcaggagaagatccgccgtcggcgatggtaaatgcctcatcggtggagagcaccttgtcgatgaactcttctattttttctttgccatacagcatttttcgtttacctcctatatgtatttttcatctccaaattggaatactgtctcattctatgcaggtttggcgcgactcattctggcacaaaaagcaagagccgcccctttcgggacggctctctggattaggactcgctgagcaaatcctcaagcggattgcaggcgagctcctccagctgctgccgggcaagctcatccttccgcttgtcggacatggacttctcatcgtaggacttgtgccggcacatcgggcacgagcaatgaattttgcccttggacaacatccccgcatgctccacatgccaatagtcgttttggctatggatgatattctgcttgcgacggatgactcgggcccgctgcttccggtaatagtccctgcttcgattcataggatcactcctcgtccttggaattcccgccttttaccaagtcgggtggagcaatgacgaactttacacccatttcgcgcatggccttcgtcagcgcattctggacagccagttcttcgtcgacctcggcgataccatccttgctggtgaggtagctgcacaggaaggtctttctcttcatgttagtcatcctcctcttcgtcgcccaactcgttgtaggcgtcgttaatgaggtgggtgacgatgcacttctcgcactcatcggcttcacagaagccacagagagtgtcccgtgcattgcacaacttcgccagatattccatatccatattcagtctcctttcttttcagtgagtctgggcagccagtcttccttctctgccttcagaatgccattaggtacacactcagacagagctgaagtagcggccagtgccatgtcgataatgtaaaaatcatccccgttctgcattacatccacagaccactgtccggtcaggccggccgccgccatatccgggatcatcgcctcaatgctgttgacaacgatatccttattggcgtgataccgggccatgagcttctcctcgtgggccttgtagatgatgtagtcatggacctggtgagggctgttggcgtccggctcatggccgaagcgcttcttcatcacatcgggatcccaatagggattgaccccgatgactttaccagcctcacagtcgatgaacacccggtactcggtccgcaggggcatacccttgtagatgtgcgggtttccctccacatcatggatgaactcccggaccacccactcgttagtggtacaggctccatagatgcagggagtcgccagagggctggccatcatctgtccctggttctggatgtacagcagatactcgcccagctccagaacttccttggcgccggtgacccgggcgttgcggaagtcgaacttgctggagaaggtgccagtcttgatgaagtagtccttggtcgtgtccaagtcaaaaacccggaagcagaactggtcgaccaccttcatggtgccgctggtcagccggccataatccaggcggctgagctgcagcagcgtaattggcaccttgataatcctggtcttggggaccttaaaaaagtcctgcctgcccaccgcctcgcacaacgccggcagccaatggctgattgagttgcggttgcggctcagcatttcgtaggtgatggcatccaaatccaggatgtccaatccctggcggaaatgatggtaggcaaaggccttcttcttcgggtcagcagcctcctgccattccttatagaagaacagaaggctggcgcaggtcgaatcctggggcatatccaacagcatcaggtcaccggacagctgcgggcgcatcggctccgggagagccttgatttcgtccgctgtcacgcgtttactgccgtctcccagcatgttctgcgggtccaaatggcgcagcgtcttgccgtcatagtccagcaccggcgtctgcgcgatgagctccttgacaatacggtcgtagagttctttggccgcctcggaggggtccacggaagggaccatctcagccgcctgcttggcgctgacctcaaagaaatggtcgttctcagtcgtattgttcaggatgtcccgctgatagctggcctcaaaagcggccagagcatcaggggtcgtgttgagcagggccgcgatctggtccttggccatgatggcccgctcctgctgggagttgctgaacaggtccttaaaggagaagggcgcagggccctcctccttttttttcttcatgccgaacattttgttacctccatgttgactttttatttgcagactgtttttagtccaggctgaacccgatgtcgtccagatcctcctcatcaaggccggcggcctcgatcaggtcaggcaggtcagtgcggtcctcgtacagttcattgagcaggctgcgcagggcatccttgcagctgggatcagaccaatcgatgtcatcgggattaaagcccacctcgaacatctccaggtagtcatcctcagcggcgaccagctggtcttcgtacatatagcggtacgcactttcatatttgctgaacattttctttcctccttctaaattagcgatggacctcatagaggagcatctcgacgcggcggccatcttcgttgacctcaacatccagccgccagatggcccggtagcgatctctcatcagatagccggcagactggtactgccggatgatctcatcggcggagtctacgccagactcccggaagccgaacaggtaggatgcggagctgcggtcggcagccagggctttgagcatggaattccaccaaaggaaaaggtcgctggcgtaatacctgcaccaccgccctgcctcctggatgagcttggtcaggtggaagctgtagttgatctccaccttaccagtgtcgctaacctggccggtggccgtaatggtgtgcaccccgtcaagtggacagcgaaataatttacatttacgcatgaaaatccttcctgcacaccatatggtgctgggtactatgcagccagcagacggtcatggacttccataggggtccgcacgcccaggccgcgctggaggcggcggaagttgtaataggtgatgtactcctggatcatcttgaccaactgctcccggctggtgaaccgcctgccatagtagcgctcccgcttgaggatgccccagaagccctccatggggccgttgtcaatgcactttcccacccgggacatactctgtgtaatgccagctgcagccagcttgtcatggaagatctgagtggtataggcgctgccccggtcgctgtggagcagagggcgggcgccgggattgccctccaatgcctgagccagagtgcgatggaccaaggcagcgtcgttggtgtcccggatgacaaaggaaacgatgcgccggtcacacagatccaggatggcgctcaggtagagcttgcgtatgttggtgcccgtatagtagtgaaactccgtcacatcggtgagccacttttcgttggggcggtcggcgtaaaattggcggtccaacacattctccgccagctgtcggggggatgatgccgcccgagtgcagccatgtggggcatgttttaccacagactgaatcccaaggccacggcagatgcgcagtgtccgcttatcgttgaccggcgtatggtaatacttgtccaaatcgtcccgaatgcggcggtatcccttgtccgggctctcccggtggatctcctgcaccaactgggcgatgcgctgattctcggcgacgcggcccccggctttcccggagcgccaccggtaatagctggcccgggagatatgcagtgcacggcacgccgcgcctatggggaaaccttcctcttctgcgccgcggcgcaccgcctcgtactgccgctcctgacgaaactgcctcagcgatcccccctttccagctcttgcactttttttcgcagatacagttccattttcagcaattcattctccttcttcaaccgggcgttctcgatccgcagggcctcatcccggctccggggcgtttggtccgccaggcgcttgccacgccggtcctccaatcccgcgggacccaactcctgatactttttcacccagctccgcagcgtctgtacggctacttggtgtgcctgcgccacctcttggagcgtccggccgccctccagacaggccagcgccgcctccagccgttcctctatggtgtggtcgttcctcatgatagtccctcctctttctctcttggagtttctctcatgatacgcctttacccagtccaataccagattcccggagcgcaaatgatacttttccgcgatggccatagaactgccctgaccggacaggtactcctccgccacttggcgcttgaagtcctcgctgtacttccgtttggagcgattcccattctcctccaatgccgaaattccctccgagcgataccggctgatccaactctccatagtggtgtgccccactccggcccgacgcgccgcttcccgcattcgcaaccggcctgcaaggcattcctctaccagcgagactttttcctcgagcctaagctcttttcgtttccccatctatgctccctccttatattattttcttgtctgccttattgggagcataccataatggtccgatgttcggtgattttgcggaagctattgatatctgtaaccttcatgtacatctcctccttgtgtttttgtctccaaatcgtgggcctgtggaaatgatatgcaagtcggccggttcccattctgcaggtaattggttcagctgcattcgcatagaattttgcatccaacaattttggagaacctaattttgctaaggagagtgcaactatgaatgagaagcgtatttcgatcgccatcgatggaccggtcgctgctggcaaaaccacccaggctaagcgcttggctgaggcccttggattcctctatatggacaccggggccctgtaccgcaccattgcctgctacatggaacggcatgggaaagtcattgctgatatcgacgaggtgctggccagcatcgacttgttcctggaacgggacgagaaaggacagcagcggatgttcctgggtatggaggatgtgaccgattgcctgcgcacaccgtccatctccaagttggcatccgacatctcggccgttccggctgtacgagagttcctgctggatatgcagcgggcagtggccaaggaacaaaatgtggtgatggagggccgtgatatcgggactgtcgttctgccagattcgactgtgaagattttcctgacagccgatgccgatatacggggtttccggcgctggcgggagatgaaacagaaaggtcagcccgaggatttccacaaggttctggccgatctggctgaccgcgactataatgattctcaccgggaggtggcgccactgaaacaagcagatgacgctatcatgctggactgcacggagttgagcagccgggagacgactcaggccctactggaaatcgtgcgggagattgctggcatctgatggcaaccaaaaaaggacctgcagagcttttgctctgcaagtcctttgcttttgtttttgggggaagggcccttagggtcgccacacagaccgcttcgccagaattgttttatacaacactgtatcgcctggtcatagcctccaacagacaaatccaagaccacagccaaagcgacggctgtctcacgaacccggcataggctccacgcgggagcctgcccggacgacagtttctggcaaacaaaaataatccactgcctcttttcttcgttaaaaaagatgccaatcccctacaaaacataccacaatgccgcccatatcccctctcccctgctacatatcgccgacttaaaatcggcctatatgatgcatgaatgaaatctaaactacttgcatataattaaaaaagaattgtttgtgccaacaattggcgcatgcatgactgccaaaacatacaggacacagcggtccctttattatcgtcctccacccaccaaggttatctaaaacctcctttctcaaatcgctgtgctccagagaaactatcagcaagagggaaatgccgcagagacggcacattgaaaggagatttttattatgaccgagtatgataccaaaatcgaccccaagcccgagaacattcatgaggacatcttcaacatctgttttcggctgaccatgcccaatgttcccatcgatgagatgaagctggccactgaggtctacaaggctctggccgcacagcatcgggatggcagcctggaggatgctatggtggcccttggagtggggacccgtgaagaactgctggatgcagtccgcactttccaggcctggcgctccgagaatccggagtcggcgcaggctcaggaagaacccagccaggatgatgaggagcctgacgatcagcttcaggaggagctgtccaactcctcagttaatgacacagccatgtttgtcatcgacaatgtggttaagcggtcgcgtctgacgaaccgttatgatgtaatggagcgcttttgcgccgtgcttgagcaccggtttggttccggagccaagctggatgaaaacttggagaaaatgcacctggctaccactaaggatgttctccaggcgattgatatttattttgtgatgaaggacctgtatccggatacggtattcggccgcaagcggatgcagtctgtttgggctcctgtgttccaggagtgtttcccccaggaggaggtgggctaaattatggcgagggtccctattcgtcaggatcttctggacttgattttccagtctaattcacatctgagcaatttgtttggacatgccacctggtttgtccagttgctgttctcgattatcttgatcgtgtccatcgtggcgctgatcatcaatatcaccaagctggccatgtcgggcggcaacccgcaggcgcgcagcgaggcaatccgtaatatcctcatcgctggctgttgcctggctgccttaggcggccttgggctgattttcgccctgctcactgtctttatttaacgccgcgggcgggcggctaagggaggtatgtaagttgacactcaaagaagtagcccagcgtatccaggtgtcgcagcagcaggctgaacgggacccggctggtgcgctgaagaaaaacagggacctgttcctggacctgatccgtcaggaccaggcgttcatcatcccggaggcggtcgtctcccaggaggccctggagcagaaattgttccgcccctatatcgctccggcccaggaaggcgacccgcggctgttcctgcgggtattcagccatttggacccagcgactgtcttcgctgaacagcagggtcagaaccaggtctgcgagattgacggcgttgagctggtgcagctggccaagacctatttcctgcggggcacctatggctttctgctcaatgacggttctgcctggacggccatcgcgttcccggacctgctgactgaattttacaaggagatcctgggcgatgagagcctgggccggcctgagtttatctcactcattcagttcatcaatatggtccggcagaactacgcttacaatatccaggccggcaggccggctgtctatgatgttgagaaccgcacccaggcccggttcacggataagcccaatgacatctggtcgtccgagggcgactgggtctatgaggattgtaagctggaacacctgatgatggcgtcaggcgccagcaacgatacctttatccacatcaaaacagccaagtgcgatatgcgcatccagccggcctatctgcgggcggccctctgtgccgcaggcatgggcgaccgccggacacagcctgatttgaacttccacactgagtcgatcgccttggactaccggatgcaggattttgacctggagcgtttccctcttcagtgtgagctggctgaactgcccaggctcgacgacgagccggagccagagcctcctgccacggaggagccacccaagaagaaggaaaagccgaaggcccagatgcctggtttcatcgccctcctgctggccaagttcaaaaacctgggcaaggaggaacccccgaaggagccggccgaagatgtgctggatgtacccccagaggagacgctgaccgaggagaaaccacctgagccggaacttgaaaagaagagatataacctggatccaaagctgatggtaaaactgttctttggcgccgccttcctgatcatcctggtggccgtcatcatgcaggtgatgaagccaactcctattgacgacctgaaagaggccgtggaggccggcaatacggcagcggctgttgaactctacgatgagtgcatctcccgcgaccctgaatgccgggaggagctgctccagttgttcgcggctgacctgcaggcaagcctggatgggtatgcggccgatacagtaacggctaaccagctggccgaaaagatcaacaactacaagaccatctcagtcctccaggagaaatgcgatgcagcctacctacaggcctcggatttggagcagtccaagaccaattacaataagggcctggtggagacttccatggtggcccggctgacagcctggcggggcgttatcatcgaggatatcggctccatgactgccatgaagaatgccctggagacgaacgctgacctgtacaagggtctcatgtttgaggaaatcaagggcatggatcgcggcccagctctctcagccctgatgctgctccagtcctattaccccaacgacaaggatgttgtagacaatattcaagactggcgggatcagatggctgcccagcagattccggacagtgtcgatggaccgcccgccggtactggcagccaggaggactggcccattacgatgggagaaatctctgttcagtacaatggcactggctacgacctgtatatcccctggcagaacacctctggccggcctatgaatggtcccttgttcgctgtgacggctttggatgccgatggcgtgcctgtcgtgtccaccatcgtcaaagaggatgggacatctttttcctacagccagtatgtcgccgatgcaggacctggcccctatgaggatggttttgtctggcctgagacggcctattgggagaatgtctgggtgaccgaccagcgcattgagagcgtccggttggacagcatctccataaactacacagatggctccgatgaggaccctgtagattggagttataccgcaaccggcgaagaaccggagacagaacctgaagacgggacagagccgtggatatcctgggaagatttcctgggaagcggtttgtcatgataacaaatcagaaagggaatgataaaaaatgaaaaagaaatctttggcagccctcagcatgtgcgcggtgatggcgctcagcctcacctcttgcgggttcggcgcacccaagaccccggccgatatgtttgaagcatatcagaaggctattgaggacaccggctactcggtggacggggggatcaacctgggcattgcgatggacgccggcggcctctccatcgatgttcctgttgagctggaatatgagggcaagttctacaatggcagcggccacggcaagatggacatgtccatggagttcttcgggcagtcagccaacagcaatgtggaattctacattgatgcggacggcgacaaggtcacccagtacaccaatgcggacgatgcaggctggtctaaatcggacgatgtgtccatgaactttgtttccagcgtcactgacgacaagatcggaaccctggaaaaggtggacgatacctatgtggccaccattcccctgaacgaggtctccgagacagactccttcaaggaactgttctccagtatggctgaagatacggatatgggcaatctggatgtctccgaggtcctgaaagacgctaccatcgtctataccttcgacgccaagactagccagctgcagtcgatcgtcatggatgagtttgaggtcgatgtctccaaggccatggagcaagttaatcctaccagtggcgagatgagtatgaccatgacgatgagcatggaattgaccttctcagactacggcaagatcgacgctgacgatgtagctatcctcgatgaggtaaaggacggggccttggaccagagcgagcttgaagccgctatgactgaagacccaattttgggcagtggcagcgggtctggggacattgaattccccaagggtgcgcctcccgctaactctgccgcgccagatgagcccgtggatgacagcaagcctgcggactcaccttcttctatttccatgtcttttgagggccgggtcctcgacctcccattcgattattcgattttgaccgaggccggctggaaggctgtcgatgatggcgaatattcgttcctggtgatgaagaacgacaactatgacggcgagatctatgtctatggcaacgactacagtggcaaagaggctgacctcatcgccggcggcgtgtttggcatcgattgcagcgtcggcggtaacgacaagcggcctgatatgaccattgccggcctgacctggggcgcctccgatgaggatgtgaagactgctctgggtgagccggagtacttctcctcctctccgtatggcaccagctacgactatacggtgaaggacgcttctgccggcatggaatatgatatctctgtccgcgtggacaagtctgagggtctgtctgagatcgatgtccgggctacgaaggactaagtctttattaacgaagaaataagtctgggcgaccttattttgccgagggctgtggcccgagccggttcctcgcggagcctatgtcgggtccgtgagatttgctgaaaggagatgttgtaatcttggctgatccgctgtttactgccggcgggagcggtatgaatgcccgatttggcttagagaacgccatccagcggggcgatgaaggcgccgtcaagcgggttttcaaaacgatggagaaaggcagcacaattggagggggcctcatggccgtcatctcggtgtgcgtggctgtcagcatgtttgtgatggctgccaacacggccaagacggcagccagggagacgccgactttcccggccgaaccaggcccggcgcccatcacccggctggtggataaaactgggttcatcgccccctaccacctggaggaaatcccccgggacctggagcggatcgccgaggagtaccacatccaggcggccgtctactcctccagcgagccggtccacgaggtgtacgatgagttcttcaccggcgagaatggcgttgttctctacattgaagagcacgagaaatgcggttccgtcacctactactacggcgatgaactgtccgatatcttcaccgaggagaacatcgtcatcctgaatgaggctcagacatacctggatggattcacccatgaccgggcgcccaatgtagtattcgacttcaagcatggcctggacaatgtcttccggggcgcagactcggctgttaaccggatgccgtttgaggtcatgacaggcgtcttctggctggtgatggcagtcgtattcttcttcctcaccaggcttttctgcttcctggcggtaggtctgccgcccaggcgggtgcagcgggaggagtacctgaaacggatcctggagagcatccaactggcaaagatgcggctttgagcatgacaataggactgccaaacttgggcagccatttctttttgtccaaaagaaaagccgcaggcggccaaaacaggcaacctgcggcaaaagtacttagtcgttcagctcgggcggctcctcctcatggaggttatcgggggccggccgcatgacggcggcagcggcgtcgcggatcttggtctcgatctcattggccacatccgggttgtcctggaggaactgcttgacggcctccttgccctggccgatgcgggtctcgcccatagagaaccaggagccggacttctggacgatgccaaacttgacgcccagatccaccagctcgcccagcttggagatgccctgcccgtagaggatgtcagcttcggcgatgcggaagggcggggcaaccttgttctttacaaccttgaacttggtgcggttgcctaccatatcagagccgctcttaatagtctcgacccggcggacatcgatgcggatggaagcgtagaacttcagggcccggccaccggtggtgacctccgggttaccgtacacgacgccaaccttctcacgcagctggttgatgaagataacgatgcagttagtcttgctgacggcaccggccagcttgcggagggcttggctcataagccgggccagcagacccacatgcgaatctcccatgtcaccctcgatttcagccttgggagtgagggcggccaccgagtcaaccaccaccacatccacggcgccggagcggaccagggcctcgcagatctccaggccctgctcgcctgtatcaggctgggaaatgagcatcgagtcaatgtccacgcccagggccttggcatagtttgggtccagggcatgctcggcgtcaatgaaggcagcctcgccgcccagcttctgggcctccgccaggatgtgcagggccagagtcgtttttcccgaggattcagggccgtagatctcgatgatgcggccgcgtgggactccgccgatacccagggcaatgtccaggcccagggaaccggtagggacagcctctaccgcgatcccctgattctcgcctaggcgcatgatagaccccttgccataggctttctcgatttgcgccatggccgtctctagtgctttctgtttgtcggtcgagccggtgggattttctttcttgatcgccatgatatttttacctcctaattttgagtttggccttctacctatattatatgcaaatgtgccttttcgcattttggacaaaaggaaacggcccccgaaggggccgtttttggtttctgcttagaacggcagctcgtcatcctcgtcatcgacgggagcgaagttaccggcagcagaggagtcgggctcagcggcggcagcagcagaaccagtggcaggagcgggagcggaaccatcgcggggcccatacttgatcaccgtgaccgcatcaccgcgggggcggatctggtagctgatattgccgttgtactcacgggcctcaacggcaccggaaacgacaacgatggcgccgtcggcaatgactttcgccagaccctcggcgcgggtgccaaagacggaggcattgatgatggtcttcttgccatcgtacgccttgtccttattataggtgccgttcgccaaatcgcagatcttctccgcactcatctgagtccggatgccgaactgcagataagagttacccttggggctggtccccagaggcttggcgccgatgacggtaccgctgaccgtgcaggccatgggcagggtccgatccaggccatcctggcgactcttgtaggccagggtggcgacggcgatgtcgttgcccacagtgggatccaccccatccttgtaagagccggcgtcgatgaggttgtcaacctcgacctccaggcgctcaccgggattgccgtccttggtggtgaactgacgccacaccagacggccggacacgaccacatgccgtcctttgttcagcacagagctgaacttctcggcggcggcgccgtagagcttgatggtgccaaactcaggagcgacataggacttctccttgtcgtactcgttcttggccagggccatcagctggtcagcggggcagggcagcccgatggaggcgctcaggaatgccttcttgtcatcgtgggcggcgctgaagtagggggctgcggaggagacataaccctccagctggaaagcgtagggctcgcccttcacggtcataccgacactatgagtcttgaatctgctattgttagccatgagaaatttctccttttataatttgatttcccccaatattgtgaggatgtctgatattatgcaaagcgcagaaaaacaattccaagcgcatgcgaacagttggactggataggattggcagtcttttttctgtaaaagcggctttctttgaaagtcatgaggttttccgctacaacggagatagttagccgtagcacaaaacgacggaatcccacgggtcccacataggttcctgcgaaggaaccggctacggcgagtgactctggcaaggagaaccgcccgtcagcttttctcgtttagaaaaggatgggcgcccttccataggtggcgaactggaaactcagaccgttctcgaaaacaggctggctcacggaaagcatctcccatgcagggtcctcatccatgttggggaagaatgcatcagcgccctccgcgtcggcaaaaacccttgtgagaaagaccttccggcactgccccagcatggcggcgtatacgcttgctccgccgatgacccagacattctccgggtctgcttcggcagtcatgtgtaagactgtctcaatgttgttggcggcctccacaccatcccgggtaaacgcagggtcgcgggtgaggataatgttcctccggttggacagtggccggccgccagggagcgaatccagggtcttgcgacccatgataactgtcccaccgatggtaagtttctggaaccggcgcatatcggtcggaatggaaaacaggagtctgttgtcccggccgatagcccagtttcggtccacagcaacgatagcgttcatcacacggccaccgggatctgctcatgaaattcagccggagcatagccctccatggagaaactgtcccgggtgaaagcataaaagtcggtcaccgacttgtcgatgacgaacttgggggccgtggcctgctttgtttccagcagcttttccacgaccggcacatgccggtcatagatgtgggcgtcagcgatgacatggattagctcgcctgcctccagcccagagacctgagccatcatgtggagcaggaccgcgtactgggtgacattccagccgttggccgtcagcatgtcctggctgcgctggttcaaaatggcgttcagcgtgttgccgctgacattgaaggtcatagaataggcgcaggggtacagggccatctcgctgaggtcatggtgattgtacaggttggttataatgcggcgagacgccggatcatgcttcaagtcccagaggaccttgtccacttggtccatgtcgccctgcggatagtggtgcttcacgcccagctggtagccgtaggccttaccgatggagccagtctcatcggcccactggtcccagatcttgctgttcaggttgtggatgttgttggactttttctgccagatccatagcagctcgtccaccgccgtcttccaataggtccggcggacagtaaggatcgggaattctttgcgcaggtcgtagcggttcaccacgccgaagagtttgatggtgtgggcgggcgaaccatcatcccatttgggccgcaccgagcggtctgtatcccagaccccatggtccaggatatccttgcagttctgtacgaaaatttggtcagcgtaactcatttttgatttctccttcatttttgcgggaaggccccggggaatcgatccctgggcctccctgccggcttagatatacatgtaaaggtcgtcatccttcgccggtttaatgtcgattttcccatccaggcccggatacgccttggcgaaccgcttggcctggtactcggttatagtccgcacctgcttatccagcttccactgggtgagcttcagcggccagtcaggatccttgcagatctcgggatcgaccgcgtcgatgaatgctttctcctgttcctcccgctgtcggatgtagtccatcgcctttttgaggtagcggatggcataggcgtagtcaacagccttgccgccgatcgtccagccgcccagcttattgttggtgatgacccactccagccagaccgagttcatgtaggtcaggttgatgaactcattgttgtagagttcgaaattggacctggactcagtaccggtgcgccagccgctggaggccttgggcaccgatacaaacacatggcgtttgatctccgtgtatttctccaggatctccacttccggggccagcgaggagtcggcccggcagcagtagggccccgcgtattttggactgccatccggctttttgccgttctcatagcggtagcgcagccactcctccggctcgtcgtattccacaacattggccttatagagcttgcagtcttccaccgagcagtcgcgggtccggttgcggtctcccctgccccgggtattctcccaggtgtcagagcgccagcctccatagaggctgcgttcccgctccggaaccagatactggaccgtaatgagctggtcgccctcattgacccggctgttgcacagggccaagatgtcggtgaaggaaccgaaccggttgtcagtcagagatttatcagccatcgaatagatgacatattcagactgcttgctcagcttgactccctccggcagcggcagcagcggcgagttgtccacgatcccctggaggatattgtagacgaacgcccgggagatgatgccgtccagaagctgcttgcgggcttccttctgctccttctcatactgcttccgttcgctctcgaagcggaactcctttggttcatccggggtgatctcggtgatgacccgactgatgatcaggtcgtcgctgatgtggacgcgggcttcatccgtccatcccaggtagacattttcgccgttgcggatgatgatgcccaccgtccggccatggtagtagttgtagtcctccaacatgttgctgtacggggagtcagacttgcggccgaaggtgcgtccagtccggctcagccggaccagcatgacgcagcggtcattgggcgcgaaggtctccagcgccagcggatgatgctggaggaagctctcgaacatacccagctcctcatactgcagctcatacagagaggcgatgcggcccagatcctcatccaggaaacgcagcttctggtagatgacgatcggctccgtgttgggcgcgttcttgcccttgcggatatgggcgaacttgacgacctcgccggcataacagcggatggcatagagctgcgagtccaggagaaaaatctggttctccaggttttccttcatagcctccatctcggacatcttctcctccagctgagccatcagattctgcttcttctcctccagagtcgtctgcagggcgtcgatttgggccttcaggccggccagttccttggagcgggcatttcggatgtcctctttctgctgctccagcgcgtcgatcgccgacttattttcctccagcttggcggacagagcgttgctggtaagcagcccctgctggtcggcagggacgattgcagagccctcagagcccatgggcaccgaaagctgggcccggagctcggctggcgtcacatcggacaggtcggcatccgggatgtactccaggtacttctcaggcgtggggacgatgatgcccttgccagggttacccaggtacagataggcgtatttgccatcttcccaggcgcccaccttcagcggctgtccatactcatcagagaagagatggaactgctgaacgcgggcaatggccgcctcgtgggtttccttccaggcagtctccctggaccgcccaaatccaccgtagccgccctgaggctggaacatctcgtctacagcactgtcgacctgactgcgcctatagccttccctttgaccttcggttgccttccgcatctgattatgagcagcgtccatggcatccagagtctccaggctggagtaccaggccaggtagccgtcatagtcagtgaagtgggcagagccatttcgtttctcagacatgtatttacctcctttttggttgttttcccctgcgatatgtatttccaaatcgtaggatgattaaatgatatgcaggttggccgccgtccattcagaaggggatatcaggcggaatatgtacgcgaaaatcggcgcgggtgagcgacagagagcaggcgtccagctgcttcttcttcgccccattgctgcgcgcgatgagctccaggagccgcttcccatcgatcatctggatcccctgctctttcccatatgcagttgctggggcggagaatgaactggttgtcacaaaccacatatgaccggccctcatcgaggaattggctcctaccagcttctgcagggcctgccgcccaaccttgtggtcggcagcatagcacttgcactccacgatggctgtctttccatccctggatagcaggatgtcatacccgccatcgttggcaggaggagtcacctcagccttgtacccgagctgccggaagatgtcggcacagaagtgctcgaatccggtaggagattcctcgtagcgagaaacgatctcaaagacagagttcgcctcagtctggctgaactgcttcgacagcgccgctttcttttccttctcttctttgcaggggctgatccgctgccccttttcgcgcaattgctgaaccaagcagtacatttcccagggatcatggctctcgattttccaatgagaaaactgcagcgcattaagagggcgaatgatgctattgttggacagcctgcggtctctggtaccatcgacttttgggcgggcccaatatggatacttcaaccagaagtgccccgacgaaagcgcgtcatcggttttttgcacgacaaatccagatgggagggcaacaccaaattcttgcgcaaactcctgggcccacctttttcggcgagccatctcctcctgggccaattttttttggcgaacgatctccctgtggtttttccacaaacaaaacaacatatataccacaaacccaaccagcccgaggaggaatatgagtagccctatcgaaaaagatatagtaacagcgtccaaaaccccatctcctttctgtgttccgtatcctatgcaaacatgagaatttggatttcctgttatatggagaagggccggctctgggccggccctgtattggctggaatcagatcaccatggttccgcccttcatctcatgctggaaagtctccggggcccggactcgatacttccggttcttcatcccatcgatatcccgtttggcagcactgagggaatcaggcgttacactggaaagcagcttccccaagatgtgggctacaagatcggtatctttgatggcgcggcgctttagtcgaagctcctgcagccggcggaagctcttgtagccatctgccgcattggcgttggcgaactcgacgaagtgcagttcgtccgtgatctccttttccacactggaaagcgccggactaaggcttggagcaagcactattttcagctccatataccgttcgaggacagccagcaggtcatcggacagagctacgctgtcgttacccttcgtggtatcgcagcccggctccgtggtggcctccaacagggtcgccatcgcaggcgtggcgccaggctgaggctcactgggaggctgatttgctgcagctgcctgttctgcgcttggcttggttgtaccagccgttcccttatcaggggctttattggcccaggccgggagcgaatatcgcatcagcgcctctttcgggagcggctccgaatagctggggccggaaggcggcagctcgacatggacaaacccgagtccggaaacaaacctaacctgaagagcctcctcgatgaactcttgagcccgaatcgtggatccgtgtttgaccgtactcggaagcgaagactggactgtctgggcagtcttgctgtccggaaacacatagatggggcatttcccctccgccagctccttgtgactcagccatttttccgggccaagcaccagaaatggggatgttctgcaaatgaaatagtgagtgcttgccattttttagttcacctcctaaatttgacggcccagccatgtcccctgcagttcctcatgtccatcgcccaccgggacgatgaaattaccgacggcaatcgactccagaatgctggtatcgatccggatatacaccggcttccgctctccgtctgttttatagaagatggagattccagggtcggccgttttgaacactcccggcatattaccctggcggagcatctcatcccggtcggccagcatggcccggtcgaatccccgccggctcaactcctgcagcagccgtgctttggctaccagcagagctttcagcttggtgggcggttcgccctcctctccaactggaaaatagaggaggaagaaatgtaccgggctgtccagcaaccatccagaatccacaaacccatggttcatgaaggagagctccaggctgaagtactgacagtccttggcataaccgggatattcggctatgtaggtcgtataaggaccttcctgcaggacaacatcgataccgcggctccaggaactgttcagcatgcgggtaaaggatagtgggtagggctcctggattgccgactccaggggggcgtacaggtttgcatccaggtcggatgcatagctgacatatggatgggaaagaggttggcgttgagttgcattcatgattttgaattcacctccactgcccttctgggcgccttttcatttatattatatgcggaagtgcgttttcgtatttttggctggaatatggcgagatttaaggccttttttagcgaagaaatgtagcggaggaggtctttcttgcccatggcttttgtcgtgggcaggctccgttccggacctatgtggagtccgtgagacctgcttgttcgccgcgatacggagttagccgtagtataaaacgccggaacctcacggaccagacataggttcccggcgagggaaccggcttcaacgagtgtttcaggcaaacaaaacaagtccaggcatattttcttcgctaagaaagatgctcagctaattcctgaatgagtttctgccaatgcgcataccattgtttcagacaacaatttggggaaattgagaagaaaggagaaactgcaatggcaaatatcattaagttcggaagcctctgtctcgacgggtttcctgtaaatgtaggcactgagtataagcctggccaagccatcaagatcggagagaccacacccggcaaagagatttcctgggtggtggtaaacaacctgctcatcgctgaccacagcatcctaaccggcattagctgggacgacctgaatgccaacggcttggtattcggaaaagagatctctgccggcggatttcgcttcacggaaagattgctccgggttgagaaagatggtggcatgcctaatgagtgggatgccgcgctcgatgctacaggcgatgatgacgctatctggcattggcaaggcatttacttttgggggcaagaggccgccaaaagagcatcgccccgcatagtgcgaggatatctctctgcccgttccaggggccgcgttgcggcaaatcggggcacgaatggcttccgccctgccatggcccccctaatctccagcactctggacaatgtccacgacggggagaagctgatgctttggggtggccagagcatcgtgttcggccgcctggaggagatcagccgctatgaggtagtcctctccgatggaggcggagtcttgtctaatggcttcggtaccctgtctggcggcggattcatcgtcatcgatcgagatgccgttgtagggctgcagattgcccaaagggaggtgccatagatggctacactcatcagaatgggcagcctctatctgggcggctacccatcggggctagggacagagtaccaatccggacaatccatcgaaatcggcaagtccgtcctcggcaaagaaattagttgggtggttgcgaacggcatgctggtcgccaaccgctgcatcctcaccaaggtcagttggatggacctgaatgacaacgagctggcgcttgggaaggagatcaatatcggcggggttcgctgcgtagcgagactgccccgggtcggggttaaagaaggcgtccctaacgagtgggacgccgccctggatgttgccggggaggacgatgacctctggcattggaaagattcgtatttttggggtcgagagattcccgaaatagtatcgtcccgtgcagttcgtgggaggctttcggcacgcaactggaatggtagccatgcaaaaaatcgtggtgcccttgggtttcggcctgttctgctccctctacacaccgaccggctgggtgatgtcatggctggaaatacggtagtgctatggggcggccagaatatcgtgttcggacagttggaacaaatcaccgactatgaggtggttctttctcactgggacggggcattgtccagtgcggacaacttcagcgtacaaattagcaagggacagctcgtcgttgatcggggctctatcttgggagttcagaaaaactaatggcactctaaagcggggttagaagaatctctctcggcctcgcttttttgcggcacccagagctgcttcctgcgggctggggagtctttattaacaaagaaagtggcatagggatttctgtttgccggtggcttttgctgcaggccggctcctttcggagcctatgtcgggtccgtgggacctgctcgttttccacacgacccgcttcgctagggtcgctgctacgatggagatagttagccatagcacaaaacaatggaacctctcggaccagacattggttcccggttagggaaccggccgtggcgagcgccaaaacaaaccttcctcgttgcatttctccgggaaaaaagacccgctcccccaccaatatagaattcaagccccttgcatatcatccaaccggaacccaattttaaggagaaagttaaaccaaaaaagagggatatatactgccatggttgaaaaaataaaattcggaaccctgtatatggacggccagccccaggaagttggcggttggtacccaaccgatgagccggcccttgggctgggcaatacagttcctggcaaagagattacctggctcaaatcaggcaacatctatattgccgaacagtgtctgatcacatttatcagcttcaacaatatcgcttactggggctattcggagccggtaaacatgaaaattgacggccgcctggctaggattcggctgctcaatataggtgagcgtaagggtatccccaatgaatgggacgacgctctgaacagggtcggtgatgagcgaagcctctggaacggtggaaagaaggacgaatgggattctggacttgcgttctttggagcaaagaaaagtaaatcctctccactcatcgttcgcggcgaatacggccagccccggagcttccatgtagttggccgcgggtttctgatctctggtcccgacgatgcatcacccagtattggctggcggccggcgctggagttccgagtcgacagggatgccgtccctggcgaccagctctgcatcaagctgaggcacagctgggtgcgcggcatactgctggagaagactaactatgacctgatcctgaaagccatcccggagaccccatttggactgctgaaagcagagggctgtcttctgctcgatcaggagaagggccttgcggctgtagagagacagtctatcatggatattcaaattgaggaggaataacaatggagaaaacaaacgctgaaatcgccactctggcgatgcttctgaagggcatcaacatcaaagccggcgccaggaaagctgactgccggccattcattgaaaagctggatgagcacattgacgccttcgtaaaggcggccgtggaagagggatatgccgaatctgaggagagccatctccctgaggtcttccccagtgctgacatgcggacggccgagttcgaggaggacatccggcgccgggccgaatacccggagtcgctgttccctatggccacagacatcctctgccggcggctccaggactggttccgcagagagttgctgctctatgtctctgacattgatttgtcctatgggttgaaggtggaggtctccggtctgctcactagcagcttctccagcgactcaatgtcccccgtctccaaacaggaagcctacatcgaaaaaatccagcggctgcaacaggaggggtggacctaccaggccaaccacggcagcatggagctggtggactgtcctaccaatcatgtgaagatcaggcaggttgtcgacagcctgggtgggcgcctgtatgaggtgctgctgcagagagaccgtatccggagcttctctttccgcatcccaagcgaccagtgccgccagctgttccatcagctgtccggcgaggccccggaggaaaagaagccggagagcaagctggtcaccagggatgatgaagccgtcatccaaaagactgtgaaggacatccaatttgccctgtccagcatcaacatcatggatgaccgcagcgtcatcctctcgctgctgcggagctacacagagacaatcgaggcagtccttgggttcagcgacctgagctgtttcaagatcgtcaaggcccgccacgccgaggaggcccgcaaaaattgcagcctccgggagcggcagaacaagatgagcgaggaggctctggaggaactggatatgcgggatgcctacgagaaaatcgaggccggcctgcagaagtttttttacacgctgggcatgcgggtctccgacctgcgggcctccagctatgcgaccacccggttctctgctatgccgcgcacctactataaggagtgcgcactgcgggaggacctagaatttctgccagagctcggtgaccggtctgtgtacctgatcaacaccccggaaaatatcatcaatctgcagaatgctctgtgggagacgatgtctggggccaagattgagaaaatcgagagcgccgtgcgcgggcacgggcagattgtgaagaaaatcgacttcaccatcagtcctgccgatatcgccaagctcttggagaaaaccaaagatatggaggaagtacctgatttttgagcaaaacaccgagggcctggcatttcgccaagtcctcggtgctgtcaacagccccgatccatacattgcgggacgcagtttgtacaagcaacggagctgttccagcgttgcttcttgcaatttaccatctcactcctctagcggtcctgaacgccatacatagggtccagaagggacccgttacggcgagtgattccggaaaacagaaatttcccggtcgcatttcttcgtaaaaaagatccgacaactgcacagctttctgtggcaagatgatgtgccgtcgtccacagaatggatgccggttaatctgcataagattgtttcagtaatcccactttggagagatcaaggaaggagaatacatacatgcgctggcttgagaacctaataggcctttgtctgggccacgccgtcattctggaggtctggcaatggctagaggtccaaatgtacggtgaagtccaggtgcgggatgttgatactgtcgttacgctactttacctggcgttcgtcatgatcgcctattggaagggccgctgcgatggtcacaatgatgaggagaacaaacatgaagattgaagccgttaagaaagatgacctgctgaccagttacctggcagtaaactacgagggccgcgacacgctggtcatcgagatcgagagcagttgctctaagcaggagttcatctctttgatgaaagaactggacagcctgggagttctgccgcccaagaactggcggacgcccggcgctactatcatcattgagatgccctggagcaccgcctgcaagctggtgacccagtatcacaacgggactatttccctggccgcctaccgcggcgggaagctgatttccgaaacgcccgatgacaaaaagtaaggaggaacgaagatgtatagcaaacaggatttggaaaaactcaatgggaatctgaagaaaatcgaggagttctgccgacagaactatatcccccgcattccccgccgtgaggaccggatctgcgtggattttggtcccctggaatcctatcccagacagtggggccgggagccgaagtactcctttggcatggatggccggggtaatatctggttccgcgtcggcggccttgtattgcctttcggtgaggacaagcagcctaacatcttcaaaaacaatgtttatggtgaggacctgcttctgaattggaagaaggtcaaaggcctcatcgaggctgaactcgccattctcaccgagaagaagagaatcctcgacgaattcgaagtctgaaaacaaatttttaggaggaattaccatgaggaattacgaaaaaatcgccagcttctgcagcgaagaccccgtccttttccggcaggccttcgtggcctttgccggtctcggcgccgtgaagatgaaacatctcacccccgccatgttcgacgacaagaacgacctctctgatgaggacattgagaaggtcgtggcgatggccaagctgatggccgagctgtcttcggacgccctgtttgccatcatccagcgcaatctgccggtcgtggaaggcgatgacaaggaggttccattcctccacgagttcggcgatgaggacgatatctgcccctgctgcggcgctgaaatcgagtattgcagtgagcatgatccggacgactccgggtacaccatcgactgggaatgccctgagtgcggcaccaccggcaaggctggatatacggctgtgttcgaccgccattacaaggtacaggacgccaccgggaatgatgttcctgggcgtgaccagtaaggaggatcggaccgatggaacgaatcagcaaggatcgctactacctcagcatcgctgagatggcagcccggcggagcacttgtctgcgccggtgctatggggctatcatcgtgaacaacgatgagatcgtctccaccggctacaacggcgcgccccgcggagagatgaactgctgcgactgcggctactgcgagcgcgaggccaagggcgtgcccaagggcgaacgctatgagctgtgcgtcgcggtgcatgccgagcagaatgccatcatctctgcttccaggcgggaaatggatggcggaaccatctatatcgtcggtatcgacgccaaggatggttcttatgccaacccgactccctgtctcatctgtcgccggctcatcgtgaatgcgggtatcacccgctgcgtgggtctggtggatggcgaagcgcaggatgtcccgctgcaccggccggactaattgttggagacaacaagggagaaaggagactgcatgaaaatcttcgcatattcccagggagaatataaggataggccgctgtacttcgcccagttgtccccggatggggacgacatgaagaccgacatggtgagcctggagcagaaaggccgcatcctcatgtacctgaacggtctgtaccggaaggacgacccgaaggatgatgaatgggttgccgagtacgagctctggtgccggatgctctttttctggaatgccttgtgcctgaaccccaggcacttgggcatctccggcggggctgcctggtcggtggtctatgaggacttcctcagacagctgcccactgaggccggcataaagtacctgcgggcagtcctatccttggagcgcgtcatcgctgaggcgcctgcccatgcgcacgggtggttctatctgcctgattggccggctcccggcaaagcgacaacttaatcgtttttctcaacaaaaagagggcctggcgtaatgccaggcccttttgctatgctcagtcgccgagaagtgactcgttgttgtcaacgacctcatcggccgcatggacatagtttacaaggaaaccatgtttcataaacacccatctagggatctcctgaatagcgtctccccagttgaagttgccgcaggtcctttccaggacctccttgccctcttctgttttcagaaaataggctgcggcagctcgaacatgggcttccgcatcgaaacggcggtcggggcaaaggatctcagcgctccacaagtatgtctccggccactcctgcccaaacagataggtactgaacaccagtggcaccagctctacactgtaggcatggctgccgccctcatgcccactctggaaacgggccaaagaggacagcggatcggcggtgatgcacttcccaattgctgtgccgccatccaggaagtgaaactccgggatgacctgatactgttccttgttgctgactaacttcaccgtcaggcggacgcccgaggtgaaggcggcctcgtacaggacaaactcatcatcctgaagtaccccggcctttttggccccaggcgaaagagcggttaagtcgtgtttcatcaggtcgcgggcatattccagcacctgcgggcaaatcggaacctgaacaaagtgctttccagacatatttcttcctccttaaaattcgatgtcatccagatcaggaatctcctcgcccagccaggaggcggcacgctccgcaaccgactgggggatataactctcaccatccggcacagcccggccgtcctgcagggcggcccgcatgatgccggcaacctcttcagaatcctcggagaccagcacttggcgaacctcatcgcggctcagcacgaatgacactcccacgcgggcccagagcttgtatccgccagtcggggccggcttggactcgattcgggcggagagctcctccacccggcgggccacagccagctccaggtcctgggcagtatcagcgggttctgtcttccaggaaatctcctgaaaggagctgacttccttggccaacagctggttcagcagggcggcccgatcttcggcagtcatggctgcggaaccatccgtcctacggaccttttcttccaactcgacgatcttctcagacagggcgaaatcagcccgatccagattgtcatcgtagaaaagcatatacagggccatccagcggaaggccaggtacttcgagatatttttctccatgattatttttcctcctatttctattttgtcgtatatccgccagttctggcgtatcgggcctcacggggcaggttttctttgatccaggccgagagccatcgtctggtgggcgcaaggtcgtcgtcctcgaacttgagaagctgttcccagagccgggtactggtgttttcataggtatcggccagcgtgtactcgccggagtcaccctcgtccttcagccacttaaccagctttgcgggatcgcactcctggtatttgagccgggagacgatgcccagaaaaaggtcggcctcatcgctgagtatcgcacacatatcctgatccgggcgcccataccggtagtgccggatgattcgggcaaccagatgggaaatatcctccagatagctgatgcagaggtattcctggacatctccaggaacctcaatcatggggatccgctccagcatcgaaggtcccaccgtcgttgtggtgaaaaattccgagtagcggtcgtacttctgctggacgaggtcctgcaggcaattcttgggcacccgaagcaggacattggcgtctaacatggccgcccaatagggaagactttcgccgtcgcagacatacaccagatcccggtcttcgcagcaaaggcaggagttacggccgcagtgcggccgcagtccctcctccctgatatgctcccacgactcctcggtcgtgaggtgatacatgtacttcatgttccagccctccttcaaatatctgcccgcaggcactgatcaagatgaatgcgtctgccattggcattgaagtagggccggccgccggtcgtgtagtagatcctggcccggtgagcgatttgctcccggtcagtccccacgaacagccagcgtatatggtcctggtcgatgatgtcgacctcatagccagcaaggccaagagaatagtagcctttcatgttgaatatctcctttcgtccctcgaaaaggggacacatacactgcctcacggcaggtttgtttccttagactaggcacagtcatgcatggtccgggactgcaggcctagcgtggcgctctgtgttgggaaagcaccccggagtgcggcccatgtcgcgtctctgcttacggacttcccggcatccaccgagggccgaagcccccggcttcagccgcggggtctatgactcaccatcggtgtgaaacacccggcggtggtcatcctcgtcccggatgtcgttgggccaggcacgggttacaaatccaggggtgacctcatactcgccggcattgtgaggatagatgctatccttactctcgataggctccccatcacgcttggcgattcgctccacgggaacctcggcaatctcctgttttgccagattcggccggtcagggtcaaagccgcagagtccttcgccgccaggggtgtactcgaccagggcaagccgctgaaaagcctcgccgctcttggggtcagctctccaaatctcgatccccgggtattcggggtcaatatagggagtcgcaatgagcggtccgccgggcgtccggatggcgaatccatccgagatgctcgcattccaggtcttaccatactcggagacaggcagccgaacctgggctccatctccttcagcggtgatgtagattgccaggaagtcgtccccgttccggccaactaccatgcatggggcgtcagacagaagaacgctcttggcaacccatgtggtaataaaaagctgctgtccagtctccaacccctccaggttttcaggattcaggacttttacaggccctctcatgtttcatatcccctttcttcagcgaagaggcatcactctgtatgccttcagccagtaacgcaggtcagcaatggcctcctttggatcgtcatggctgtcccacacgatgttcttgtcgaagtctccttcatcgctgatcatgtctacggtcacatcgtagctgccgtcatcagagttgataaagcagcagatgtagtagtcgcggaatacgataccgtaggcgccgcgggcatccacatagaagccaggcagccgggcagcgatgattggttccattttgggatcgatgtcagtgctgaatttcatgttgttctcctccttaatatgtataattctccatttttttgtgtctccagattgggtactgcttagatagtatgcagggatgatcaaatcaattttatgcagacagcgcttgcacaaattgggaagagtttaagatttgagtcttttctagcgaaagaaatgggcggaggttcgttttgcttgccggagactgttttccaggccggttccctcgcgggaacctatgctgggtccatgaggtcgattctctcctgctggacatctttttgagttgggcgttgtgcgcaacaggtaagtgggttcattgttgcagcctttcgaagaaagggtttgtagtctaaaacaattagccctgcgaaacggtttcgcacgaactgctccagcagaatggcgccctactatcttgcgtatgatatgcacggacacggcataggttccggaacggaaccggcccgcgcaaccgcttccggcgaacaaaaacaaccctcgcccattttcttcgttaaaaaagacctgtatccaccagaaaaagcaaggcgccagaggaaagctcctccgacgcctgtttattgctgcaaacgatcaattctcctgagccatcggcacaaagtccgggcattccaacacatagccatagtcccgggcaatacgctgcttcgactcctcgctgaggccggccgggcagagatagttctcatgctccagacagcaatccttggcgcaccgtttgcacatgcagtccgcccaatcgcagccggccttcgtgctccttctcctgctcatcccagcaaatacctccccagcagaattgccgcgggaatacagacacccaggtataggagcatcagacagaagatccgccgactttcccgcagtcggaaatagtcccaaacgacctccttcagccggtactccttctgcacctcctgatatgcattgagcttgcactcgccgtaccgattccaaaagaccaagactgaggtaatgcccagaatcgagaggtggtgcagcgcaactaggataaagagcccaaggaggaagtacctcattcgtcctcaccgtccttctccgcaggggcctcgccgaattcctccagcagttcctcatagacagcatcggagctgtactgatcacccaggttgtccatctcggccagccgggcggcgaccttgagcagccgctccttgtcagtcaggatctcatcgtcagagacggcgaagggccagctttcagtagtaccagcctcgaactcgatgtagtccagtacatcctgcagggccgtcagcacatggagcagctcgcggtcctcggtggaaatgcccagcccctccaacatagcctccagatactcctgctcctcctcaaaatccatgccctgttcggacatatacttgaagatgttgtgcagtagcgttgcggccttgccgtggatgccgtacttgcccgccaggtagtccacatagccgtccttggaatccggtttcgggaaatcaggattctccccattcgtggatttgaactcgacatcccggaagccaaagggctggtccaagtagttcttgccgtccatccggactacatccccaaccgacagagaccgcatcgtcttgccgttgggcctgtcgtcgcggttgaacatggagtggatgcattccagtacggcgtcagttccgaggccgctgggtacttctaccggaccggcgaacaccggagagtagtactgcgccgggacaggcgcctgagagtcatccttgtgcatctccagcaggaaaccgcagtcgtgcaggctggcatagggagcctggaaaataatgatatttttcgtcatgtcgttcgttcctccttaaataatatgtattctcctgaaattggggtactgatgcatgctatgcctatctgtagaaatctattctatctggggtttcttgtggcacggacctttgttaacgaggaaatgaggcaggagtttttctctctgcccgatgctaccgcccggtccagctccgttccggagtctaagtctgggccgtgaaacatgctgaggctcgtttgcgatgcgattaggttgttccgctgttgcgccaaacaaccgagacagaatggctctaggcaagttcgcataggatatatccagaacctcaatttggagactacgcaaatcccaaggagaaacaaacaactcgggaagaggtcggggttccctcttgtcgaacaaaagtagcctgtggcaggacagttgtcctcctttcgaaagaaaggatgataaccatgatgtccatagttgaaacttttgccgcagcagatttcttgtcttttttaggtcgcatgatcgtgcttttcggcttttgtgccgggatcatcctcctgaaggcctgggttgccaagcgcagcaaggatcgggacatggccaggcgcgcgaagctggatcaaatgatgcgcgcgaatgcgaccaatgacgcaaagaggcaggctcgcgccatcgaagaggtgacgcggacctgcctaagcaaagaagacatgatcatgctattttgttcgacaagtgggccgcaatccatttcgacgagcagagctgatctgtcttcaccctctgatgaggagcccaagggttcctctgttaccctaaacatcggagggtaactgcctgccgccagcgcatacccgtgcgtttggttaacaggctatcgtaatcatatgcgggaagagaaaaaactattggcgaaaaacgaacaagccgtccaagaacttaatcggctacgaagcgaagcagtctccgaatcttcggaggctgctttcttttgcccctactgccgctgccgcagccactcctctgcctcctgcttggccgccaacagagcccgcataaagacatccgacccacccttgtccgggtgattgaccatggccatctcccggaaggccttcttaatttcctcctctgactgcggcagatggtccagtcccagaatggcgcaaaaatcgggcagcgactgggccggcggcaggctcttcatgccagcaatccagttttgcaggtcatagatgccacggtccaccagtcgtgccagatcctccagggccagcactacttgggcgaaggcgtcagagccgtaggacagcttgtggccccgcgcctgggcgttctggacagaatgctcgaagcggtacaggctgcccttgtagtggaactggacccagcagccggttcggttgcagtcccagtcgtattgctctggctcgattccaaaccgctccatcaccttgcccagctttttctcatagaactccagggatgcgtattgttttctttctgccatttttcgattagcctcctttctgataccggactacccgcaggggcagtcctcttttcttcgtctcgttgatcatatgcgccgtacctcgggattgtccatcccagaaagcgactaccgcatcggcagaatccagcatctgcaaatttcgcaccatgccggcccgcttgcccaggcgcacccaatcggccgggaactccagtaccgggacgccccgctcccgggcatagcgggcgcccagcgtatcggcgccgcgggccgcgcctgatatgatggcggtcgggggtttctcgcggaagaactggtcgcacttagcctggagcagcccgtagtcggcaaaatcacggccgccggcgatgatgacctgaaaacccatagggctactcctttccctgtgtgactgggtcatagctgacaacatggagagacaggctccgcatgatggcctcattttccagccagacggtccattggtccttgccatcccagaatagtacaaccgcatccgacttgtccagcatgcggcggtaccgggcccgggcggcggcagaagtctcctgccaggggccggggaaacgaaggacagggctgccccaggcctcggcatagcggatggccagccgctcagcgcctctggcacagccggagaggatgggtgtcacgcccttgtccttgagatagccgtccagatccaggcgaaggaactcaaaatcggtgaagttggtaccgccgctcactagaacacaaaagctcatgtcctggcccccttacggtcgaagaaaccctccttgctgcgaaagtccataaccttcttgaccccctcatagaccttgtctgcccggtcgatgcagccctggatactgcgaataatgagcttgttgacagcattctggacacgctcgtccaggactgtcatctcagcctttttcttccgctcctcagcggcacccttggtgccagtcagcttggccagttccactgttaccttggcgtccatcttcatatcgcggaacatattctttacattgtactggttgagctgggactggagccgggagcactcggcgggaatgcgcatggccagggcctccagctcaaaggctgagagattgatctcggagacgacagagccgttgaccagcttgatctccacgcaggagttcaccaggtcgatgaggtcctgcaggggcttggtggccttggcgacttcggcctgggcatagacctccaggctgtcgataagctgctgctgttcgggagtaaagatatccatgttgttgttcctcctgtaagtctttgatattgagctggagtaggccagtagagttgttttgttctcactattattatatgcagatttgccatttcgcattttagggcggagggcggacggaccttttgccagacatgccccataaaacaaaaagacctgggcgtcccaaaacaggaagcccagatcatgattgcagacggccacaataggcagcctgaatttttttctcctacctgatgccacagtggatcagcttgttccggtccaaggcaaccatgtcctctcccagcatattccaccactcattctgtccgcgtgcccgcgagagcagcttctccagattttccttggaatcgacccgtaccagcaggtcatagttactgacctcaaccggctggcccatcaacacaaatccgggcagcaggaaagtcatatcctccctaacatgctccgccggattcggcatattgattggctccagcactggcagccaggcaaaataaccatggggccggtagtaaccacagaacatggccgcatgcttctggtcgctgatccagccaagatcccggccccgcatcgtcgggttgccaatcacttgtgtccagaacataccgtccttggtgggccgggattcggcgccggcctccgcccgggcaatcagcagatctgtctcgtcctcttcggggcgactctcccagagtttggcatcccgcattcctgcggccggctcgctgggctccttatggatgttcggaatgtggcacatgaactccattcctgacatcttgaccacagacccgcggataggggacttacctgtgcatccggaaataaagcctgccttctggagctggctccagctgacattgcacagcaggctttccgccgcaatcagctttttgccgacacacagccaggggagcatcgccccaggctgaccatcgccgagctctatcttttggcctttctggtactccggacatgggctatgcgggacaggaacgccgtccaggtacagagacccgaaaatgacaatatccatcatgtatgattcctcctattcggattgatccaaattggcgtatgtcctgtgatatgccaaccggcagatggctattccaaacaacaaattgtttctaacaacatgggacggccattccaaaaaggaagcctcatggacccgacatcggttccggaacggaaccggcccgcggcaaaccctaacggcaagagaaaactcctccgccatgtttcttcgttaaaaaagacccaccaacccacatcagccagggtatagcgtaagcatggctgccctgtccagcagaatttcctttccacctgtccactggccccagagtccaaactcagctattgcatcaaattcagaagtaacctccagtaccacatcgtaatcagtgcaggaaaccagcttcccgcgcaggatatcgcccggcatgacgacagagacctgctctccaagcatgctttcgggagagtattcctgaatgggctccagcaccggaagaagcccaatatggtgcagagagtggacatccaggggcgcatccttgctgacccggaatgcaaaatgccagccttggtccttcaggaatgggtcgaaaatggctacaacaacctgtttgtgcatctgagcaaagaactggacctccttctgggccgcctcgccccatttttgtagaagaggaaaatcaggactttcctcaagtccgtttgcctcagacacatagggcagccggcagatatagcgcccaccatccatcgacacaaccttgccttccagcagccgctcaccggcaagaaacttgggtgaaagggtcagatattggggatcggcggcaatcagcttgccgctgccagccacccaggcggctttcatagtcccattagaatccgtgatccgcaagtctttcccagatttgaaccgggttgcgaaaatagaaccaaaatgaacaaactccggcatgtacatcacctcatatatattatatgcactttgcaattttggcatttttggcaaaagaaaagccgggcccccgaattggagcccggcattggctttgtcaaagaaggtcgtcgtcatcaacgagaggctctcccgccaaatcgtcataaacgcgcggttcttccgccaaaggattgtggaatactgtcgacccagggagaacatcttcccctgctttggtcgtgccgaaccgctgggggctaccctggcacatcagcgaatacccgaagcacttcagcgaaagacccaggatggtattggcaatatccttaggctcctggtagtctacatctccgagccgctccgcataccgccaggcgtcctccttggacgcaccggcaaagatgagggcattgcgaaggttagacgccagcgtttccttcgtctgcttatagagtatgccaccccggtccacctggctccaggattggagcgagatggtggcggccagcttgctgcggtaggcataggtgaacagatccaccagctctggcgccgcaaactcctgaaacttgtccacatacagcacccgcgcccgccggggttcgcccatgcggagcatcggccgccggtatttgagcagagccagcaggccgaaaaaacgggagaggctgccgagggtgggctttgccgcagagacgcagatgatacagttgtcagagaccagccggtcgaagtcgacctcgcttacctgccccttgtcaaaatccgggttcagcactgtcctgaggtgaggctcagagatcagctttcccaataaaagtctcaagcaggctgtctgctcgaagggcttggaccgctcagcataatactcattgatgaaccagctggcaatatcggagttttccttctgctcagcgtctgtctcccccttcagctgtccaaacctgatgaccagcttgcggccatcctgactggggttctggaggactgtgttcatgttgatgaaggtggcgtatctgccattgacgccctccgccttgtccaggcgtttcaacaccttgatcgcattgctcagcagcgattcattgagcgcccgcaagctgggcgacagatcgggcagatactcgctgacaacggtgcgcaggtcttcgaagacctcgttttcgtctccaatcagcggattgaagaaggggcaccattccatccgggggtccagcaggacatagggtcgtccagattcccgggcgcaccgggcggcagcctgggtggggatgccgtccgtatcgaacacagcgacgcccatcataggcttgctctggatatcctgctggatcatagggagcatcaccgactcccgcttccgggagtagggtgcgcccagtagaacggcgccgagggtacggtcctcgccttcgatggtgagcttgggagtgatattgatcttgttgcacatagtttggattcctcctagttttttatccccgcttgcggcgggcattcaaatcgtatgcacaacgagacaaagctattctccttagccggcggccggcttgcgggtcatgttgatgttgatgagccctgtgtcatccaggcttttcagatcagcgatgaactgccggctgatggacaccggattcgtcaccttggtatcggcgtggggtgcgaagacctccagggcattctggtagaactcaatgaggatggcaaacgcctgggttcgctcccgctgctgagggtcgctgccgtcgccggagaatacggagagatgcaagttcttctgcgcctttgccagctcgttcttcagccaaaagtactcgttggctgtgcaggtcagcttcttgattttcttcttcatggtcaaaacacgctcctttcggtggttgtttctattatatgcaaagccagccagaccatttaccgcaaaaagacgccggagaggattttcctctccggcgtggaagatatgcggttagtcgtcgctcttgccacaagaagatccgcgggtcggcaggacgatggcgtcgatgtccgcgccgcgcagcaggatgggatccagcggagccgtcatggagattgacaccgggatacgccggtcggcgttgcaggtgagcacagcctccatggcatccttcaggtatcgggcgttggctgtctgccgcatcacaggcgccttgttgatgaccgactgcagggccgtcttcagagtgttcagctgttccgtagcagatatctgaccttttttgggctgcttggtgctgaaggtgacaccatactcatggtagatgaggttggcagtcatttccttcttcacggaacccagctcgatggtcacatgagtgccggcagcgggggtgaagaccgggttatggatagcggccacaaaagagccgccctcggcgtcgaataccgggatttcaaccctggcggcgcggtagccgtcgctggcccacagataggcccgggtgcggttcttctccttctcattgacgacctcgatgatgaagtggtcacggatctcggcggcgaaggaggtgcccttcttcttgttcatgaacttgcgcccggcagagatgactcgggcaaaatccttagcagcaaacacgacattgtacttcataatgtatttcctcctgaaattttgttttatctccagatttttgctgttgttaggctcctgcgggaagcgcgatggcggtgtagccccacttcgggtatcgccgttttgcggtctgcgcagccttttcagctgcagccttagtggaataacgcttggcgcccttgatgctggccgtataccggaccttgtagggccccgggaatccgaccaagtaattcgggatgccgctgccgtcatccacctcaacgatcatgttgcagggggcgtcaagcacagaggcagagacaatcttgcacttagggaaatcgcgcaggatctcctttgcgtcgtccacgctgaagatcattgcatctctccggtttctgctagtcgagatagagccaggtctccgctcgctgacgaagtacttgccgtccttgacaacaaccagctcatcctgagccttagctctggacggatgccggaccggctcgccatagttgagggtgatccgcgggtaaaaatccttgccagcggcaatctcctccttggcggctttgatccagtcgtccagctcgtcagtggtgtggatgtaagagaaagacaccattttcatgtagctctccatcacacagcacttgatggcgccgaaccggttggcctcgattagctgctcgatggacacggcattcttgcagccattcttgatccaggtaaccaggcccttgtcgtccacccatttgccgcgacgctgccagtgttcctggtagggaccgccgagcagcggttggattcgctccatcagtttctcctcagtaacgccgagctggctcatgaacacagaccagtcacgaacccggcgctggttccggccgctgccctcatagcagttgctgtcgccagcaagccaaagaggggtatagccggctcccgacttcagaaaaattttgtcatactcaatcgtataactcatgtatattcctcctgtatgtatattttcccctaattgaggctctgcagtgataatatgcaggtcttcttagaatgattttggactggatgtagggctttttacgaagaaatgtggcatgataggatagtgtgtttacctgcggcaaaagcctctgggtgaaaccaaggctcccttcctcatcggaagggagctttggtttactattcggttgttctaaacccctgcacagacaacagcccatccaattccacggccgtcacaccttgcacagaggatacaaagcggctgcgttcggtaaccaactgcgcaccatcccgtaaaagcaggtcgtactctgaaatctcgaccaggtgcccaatgaccgggaccaaatctctggtccaaatcatcaggtcctttccgcacagctctggcccaatctcttttgagacaggctttaactgtgggcggatatcccggccggttccctcgactgttactgccggaaggaaggatagctcataggccagattatcgacataaacgatctgtccatcctggttcaggctgttctgctgaacgaaccgctcaggtacggccttgatgaccggctccaccgcctggaacagcccctcgtcggtgatgttccatggaatattgaggccgttctctgcagatgagtttccaaactcgatattctgcgtctccacatggcggtattcctgccccatccgatatcctggatggacgcaaatgccacctacaatgatcgtcccaaagctcctggttctcatcctggcagccctccttggtatggctgcacgcaccatacgccggagcggtcaatgacaattctgctgccatctgcctctccaaaatggttgcggtcgctcccaacgatcgggtgacatgccgactccagcatcaggtcatagtcagaatactcactcaggataccaacatatccatgcccggacttggtccagacccagacctgctgcccaacgcgggtatcatcaacctggatccgcactggatccaatactggccgccagcccatacccttgtcgctgccatctgccctgtaactggggttgtagtccatctgaggcatccatgcaagatgggcgtttgagtactcggttttgtcctgcccccaagacagatagtcattctccggcttgtcgagctgctgcaccagctgccgcaactcagttggctcgctcaggtcagggccacctgccggaagccggatcacaaagggcaaatggtcgatattcaccaatcgtccaccggacaggcagaaaaagttcagcacctgccagtccacatccagaagtacattgtagctggccaccagcacatcgccgataatatcccaggtgatgtccttccatggcttggtgtcaccaatgctgatccgagggctgtgctgcagccccatcgcccgcccatacttggttccaggtacggctggcttgccgtttatgtttagagtgccgagaaatgtctttgccatatatgtattccccctttgatgattgtctccaaaattggttttctgaagctatcctatgcgaacttagaaaatatcattctctgcgagcaggcaggacagtcttttatccggagagggacagcatcttttttaacgaagaaaggaggcggagaatttgtcttcgcccaagtctctcgcccgggccggtccctaccgggaccgatgccgggtccgtgaggcctgtcgccatcggacaagttggctgttacctacaacgacggaactgcggcgcccacccttcccagaatgagaaccatccaccctgcatactatccaatcagaaccccaattttggatacatatttttgaaggaggaacataacaatgaggtttgtcagtattgaatcgtatatgattcccactttcggcaatcgtcgcacagagccctacggccggatggtagtagagcacagcggcgagacccgtaccgtccgcttcggcgagcgtgatgggcttggccgccgctatatcaccctcgaccgcaagcgctactatttccacaacaagggcgacctgtactcccctgtcttcgtcttcgaggatgaggaacagccggcctttcctccggccacgaaggagacggcaaaggaggcgcgtctgggcagcctgctgaacgcattggtggattcgatggtcgatgaggtccatgagaatctgccggtcatccgcaagctggccaagctgggtttcagcgagaacgacatgacgcttaccctgggtttcccgcccgaggaggtgcgcagtgtgctggaagagaaaaatggcgtcgctgacgcctgctgaggaggaaacaaaaatggtatattatggaaagtttgttgtggacaaagaggaggcagcattgatcgaccgagtcctgaagtcgtgcaatgggcgggaagttggctttgaaggctgtaaggagacctgtccgaacaaggatttcagagaccaggcaatcttctacacggtgcgtttcctgaatgggaaacagatggatgtgagaatcgtcgatggctgtcctccctggacagaagcctcgctgctcgccgagaacggcgaagatctccattgtacggagcctggggaagagttcttcgggcagtggatcctcgactatgagggagatgtctaccaggtgcaggttctccgggaaggaggcgatctcaatggctgatgttcttcgtctgatccgtgagtcggcacaagctgagatcgacgccggcgaggacctctatattctggaggaatcggccggcgagttgactgttgtggacgacaccgaaggccacgatcgggctatccgctacactgctcatgaccggattacgccggcgtgggtggaggagcgcattctggtggccgaatcggcaaaacagtgccgctacacggtgaacacaaagatcctggccgagtacctcacccgggtcgtccccaaggatgtgctccatacgctggagaaaatcatcattgtcactgacgacgagaaggactgggaggagctgttcccgcagctggaggaccggcatggaaacccaattttggaggtctgtgacctgcccgatgagaccctggtgggctaccagtgggcgatgtaccaggttgttctgatcaacctgaaggcaatcatcaatgcagccagagaactttggccgatggtgggcatgatggtgaagtccgaggtcaacaccggagtctgcacgaccctgttgcatgagctgttccatatggctcagaatgatccctatgccccggaggagttgttcaagggcctgccgaaagacccggaacaggctgccgaggcctgggcgatcaacacctgggaaactgatggagaatatgttttgaaccaactgaaggaggaaccaacatgaagagatttgttgctgtctacgatgaggccgctgtgcgcgatacccagatctgcaaggaagaccccaacagcgtctctcccgagatggacgatgtttgggaggactggcccaacgctcccgtgtacattggtttgttcgcgggtgtggatgaagccggcgccaccaaggccgcctgtgagacggagagctgcgacgccaactgcatccggctgatcccagtaggcgactacgacgaggagttccactacctgttgaagtttgccgccggcgccgagttctggacgaatggccttccggccgagcacctgcgggccctgtggatgtcctactgcttccacgaggcgctcacggtggacatgccggagtacgccgccaaactggagattttgttcaaccatttgccggacgaccattccggtatctggtggacgagcttccaggagtttgccaaaatcatgggcaagtggctgcgctgaatcctacaaaaaagtccctgctgcttcggcggcaggggctttcctttttggcaggtctcacggacccggcatcggtttcgatacggaaccggcccgcgccacggctttcagcgaacaaaacgaaccccggcggcttttctccgttaagaaagaatgcctcttccctactgtcgcatccatgggttctccaatcttttttaacgaagaaatcgggcgggatgattcttctttccagacatctctcgccggagccggttccctcgcgggaaccgatgtcgggtccgtgaagggctccgccgttggcaacaacaattttgggataccacaaacaaaaaggacccctgcagcatctctgccacaggggtcctcattggatatcagtcgtatttgttcttcaagtcttccaagtgagctaccccatgcctaaaggcaggggcttctggcatggctccacaacaagttgcttcatcaccatgcatcggcgtccccgaaggggacgccgaattggcagtatccttctgggaaggacttaccacagggccgactattatgctcacctttgccggcaaaagctctccagaggctgtctgcggggtgttagacctccgagtccactatccacgcagcccacataggcgtcgatctggggaatgacctatggagccgcggttcaagcggagacggttccccggtttggggagcctccttcgagtaacgctgggacaactgctttcgtccgtgaccggagggccgtcctctggcggtacccccaggcttccggtgcagtgcaggtacgacctgctatgccttgagcaacccctccttcagggctgcgagagattcgtattcgcggtagttgatcttgcggtagaagttgttcacggggacattcttgagggcgctgtagatggctccccactgaaaccaataatgagtccctttcttcttctcggggatcaggcgggccatatccttgggaacagggtccttgagccccatcccccggcgtccgatgacataggccgcggcctcatggatcgatagacccatctgccgcatatatttgatcttcccgatttgggaagtataggcgggattgacctcccggacggacagatggtacttctcacccttgctttcggccagggctgtcatcttttcatgggcgaactcgctgattttgcggttagcctttttattgccgtacagcagacatttgtccgggtgttcgatgccctctatagtgattggtttgttcacggctacggcatagcggaagatctcctccaggccctccgagatggcattggatatctggttgctcgtgcggccctccatctgtagggggactgtccagtgccgctgcagctctccctgtgggccgagctcggacgcggcaaagtggtcgtagttcatgtcgaaggctacgcagccgtcatcgtagcagaaattcttgttcggatcctccggcagcgtgaccatgcactttacctggacggcgttgccgcagtccttgagcgaccagctgactgagccggcaggccatccggggatctgctggtcgggcggcagcttcttgttgcgtttggcgatctcggaggcgctgactgccgcctccacccacccctgtccataggggaactcgacgcctgggatggagatccatttgccgctgtaggtctggtaggagaaaatctttttctcaacatcgtagcgagccatccaactgccctgcggcccgtccaggcggccaaccaggggcatctcccggcggcgccggtgcttccacataccctcccaggagcggagctcgttgcgccgcctgacctcacgccgctggcggaaggccttcttgccgccaaaacagatatggacgacgccggccttcttctcccgctccaggcgggccagctcgcccttgaggtcgtgcagccggcatttcaggttgtttatattcgacttgagccgccggatgcgcgggtccaggtacagggtctcaaacaggtactcgttgccatacctggtgggctcgcgcttgccgttcttaaaaccaacgaagaaggccagaccatccttggtgaccttcgtgcgaacccagctgccgaagggatttttgaagggtgggatgatgccgccattcttgcgggccaggctgcgggccttgaggttttccttcgccttcagggaccgggacagctggttggaggtatccttgatcttgccctcgaccttagcgatctgctgggtcttggtcttaatattcagggcaagggcttctttggcggctgagacgatgcccttggcctcagcagttagactttggacatgattggtcgcaagtcccttgccccgatagtggaggaacaggctcttttttcccagccgccccgggcgaagcatgtcgctgaccatcgtatgcagcagatgatcgtggatggcaaaatctgcattcagcagctcggcgtcggcagcctgcatagccctctttttaactggtttggaagacaaggtccgcatgatgcatcacctcttgtgggcctgatttctatatctattatatgcaattgcgaggaaaaatatttcccccgaaaaaagccacgagagctttcgctctcagggctaatgtagacctacaatatgtaggggggcatggttcaacctaaatggattgtccgccgctcaccccacatctaaagaagggggtctgtgaccttctccgaaggtcatgtggcgcggcgacatagatcacgaccataatatgcaaactgcccgaagcctattggcacaagaaaccccgcagccgaagctgcggggcctagtcgttttaggttctcagccctcctgagccggggcgttgtaggcggccttacgctcctgctcacgggttgccagaccagccttgatgacctcgccggccaccgtattctcccaggcggagatatagtggcagatgcgggacatcatgcggtacatgtcggcgtcggagatctggatgaacgcctcctgcttatcaatcatgccggacgaagagaaggtggtggcgcccgtctcctggaagtgtacaggggccttggcattggtgatcttcacagtccaggggtagttgcccagttggccatcgctgcggaaggtctggtggaagatgttgagccgctgcaccggcaccatatcgccgtccttcacctgaccgaatgcatggacgcggtcctgggagtaggtgaagtccatgtgccgggggatgatgatgggcccaagccctacaggaaccgtctcctcggctgcccggtcgcgggtcttggtcagcagctgcttggcgccggacgccaggactgccagcccagggacgcccttgccgtcctcatcggacttgacaatgcgctccaggagcttgacaatgttgttcaggactccaaagctcatctcggcactcttggacaatttgtgattgacagctcgctgttccttgaggacggccaggttcgggtcaatgacctgggtgccgatgttgcccttgcagatttccagcagttgctcgcacagctcagggctgatattggcgttcagggtgcgggaactctcaccggtaccagctgtgtagtcgcagatgtagaccttgatgacgctgaccggagccttgccttttcggccgccggcgccatgcaggttggcatagtcctcctcatgggcagataccagcccatcgcggaaatcaatgaccttattgcggcctgttgccttagtgatgatcgtgtttaccatgaaaaagcctcctttaacttcaaagttatttttcactattattatatgcagatggcctgatttatatttcgagccgataattgtagggcttgtcgcatatcatattggaaaaacgcgggaaaggagcggattttggatgaaaacgacccttcgcagggacctcagtattgccctggaacacccaggaaaactggaattcgaggagcgggctatctgccacttccttgtcgccctggaacggtaccggcggacgctgctgccccacaaagctctggcgttgcggctggagctggcgaaccgggaactcatgtacttccctccagcggaaaaccaagtcatggctgatctccatgcgcagaagctggagagcggcgtcttcgcttggctgggcgaggcccattgggagaatatcctgtttgtcggagatattggcatggaggatctgctccgaatggcgcagacgctcctccctgctgaatatatgatggtcgaccatacagcctgggccaatggaaaggagccgctggtcacggccatactggcggagaagtgaggttctggatggaaaagtttagaattaggaagaaagactcaatccggcgggcaatcgccgtggtatcggtggcaaccctctgcatgtcagccggggccgcggcgctggaacctcctcccatgtcccctcccatgccatggacggaagggatcatgaataccgaggaagaaaattcggtgggatatgggatggcaacgctggacaaggagccagtgccggtcgtatactacaaccaaaaggatccccaatatgggaaattgccgtttgggacagacataatcgaaacacatggttgtgggccaacggcgatggcaatggtcgtgtcctcactgacggaccgtcccatggaccctgggcaaatggcgcagtgggcgtatgagaacggatattggaaaaagggcaaaggcgcattgcacgacctgattccggctgcggcgcaggcctgggggctggatgttgccggctaccaggcaaaggatgccggccaggtgctggcagccttggaacaaaagaagttggttgttgtactgatgtggcctgggcacttcaccgccagtgggcatttcatcgtcctgcggggattggatgaagatgggaaggttgttgtggctgacccatcgagccagaagcggtcggaggtcagctgggattttcagctgatcgtggatgaggctgcggagaaggccggggccaatgggccgttctgggtcatcgggtgagggtcgcatctttattagcgaagaaatgtggcgagggagtctttgctttgcgatgagccctcgccacattgggttcctgcaacttccctgcgggaagttgtgtggtcagtgggacctgcggcgttgttgctaagagcggggaaccctcacggacacggcatagggtctggaacagagccggcccgcggcaacagctccaggcagagaaaactgccttatcagcaattctttgttaaaaaagaatggttcacaaaatataaaaatggagaagtgcatataatataagtaaagaagccatttaactttacaaaatggaccgcgggaaagcccgctccgtaaggggtgggaacagtcagagtccgcacaaaatttctaggaggaacaacatgaaaaggcacgacgataaagaaataaccgcccaaaacctgggcgagatgctcctgcgcaataacacatctatgacccgaggcgagtttttccactggttgtcccctatcctttccagcaaggactccggcatccgctgcggtgatgtagccatccctgagggtctcggcgaaaagcactatccggtcgtcatgaccgatgctgcagccgtccctgggcatggtctgactatcgatgagatgtttggcgccgccctccatgtgctggaggacccactcatcggagccatcattgcggagaataaggtcgcctggaacgatgaggattgggacacagtgcccaacaacgagaatggcgttctgttctctgttgtcatcaaccagaaacgcaagttcaccgccatttatgagagcggtcccgactatatccgcattgcttccatcaatggtaaggctgatgactctatcatcaacccaagatacttcatcattgaagtggatgagtacggaactatcagctgtccgtccatggccggcggtgtcttgtcccttcaggacatatccgtcgagatgaaagatggcaaagctgaaatataagcatgaaaaaagagcccgttagggctcttttttcgtgcggcggaaaggcctgctgcggctggggtcttcggcaaaggccccgtaccggtcgacgacgaatacgcgggtgccaggcttggcctggaaactgcgggttttgtccaccaaagtgacgatgtggacataggtttcgccggcctcaaggaccagggtgaacccatgcttttcgtccacaatggctgtggcacaccagtcgccggattttggggccatgcacttttcagtgctgtcccactcggcctgatgttccacaatttcgggaccgagcaagctattcaaccagccaacggtgacctccacaaccatgcctggctggatccaggttcgctgttgagtccgcttccggatgtgctctccagcaatcacggagtagcactgcgactgcagaccgtaggagacttccgctcttgcgaggaggaaactctggtctgcgcggccctgagacgccatgtacagcagttttctgccgaactcgacgcaggtcaagtgctgctcggcgcaggcgagcatcttggatagttcctggttctcatcgttctcgatggcctcaaagcggcggtcgatcatatgtatttctcctccttcacattttggcgcaggcaaatccgtcctgcgcgatatgttttgtctcctaattataggagagccccttgcggggctcttttttgcggctcagaacaagtcctgcaccacggtatacaccgtgttgtaggtctcgaacttcacccccaggcggccacccatgatggccatggagatgatccgcacaaccggactggtctgccagtcgaggccgggcacctgatcattacgatggatgatggcgggacggccaggggtgatctcgcctttgatggcaccgtaaatagtcttctgagctttgtacatttatgtaacctccttaaaagccgaaccttttctcaaagccggctgtgggcttttgcccatatgtttgtttgccccctactatgtaaaatggcatttcggcctgccatgtctggccgcgcactgagcaaagtgcgtcttgctgaagtctcataccctgccagggtagcagaaaactatgaggagcgaaaaagatatcccctttgccagcttcgtaggctgacttctatgtatatctccaatttggatgctctctccaaagtgaggtaatgcttaatcctatgcaaattgcacagaaacaattccaggcggtacattgggagttgcgaccctagcgaagcgggtcgtgtggcaagtcttttttacgaagaaatgtagcagaaggatttgtttttgcctgaaggcttttgctgcgggccgattccctatagggaacctatgttgggtccgtgaggtgtcctctcccctgccgccggttcccattgttgtacgcaacaatggagcagccaaccctccaggaataagatttgccatctccgcatagtattggacagccatcccaatttggaggttatcaaacattgaaaggagatacaccatgaacacaaagatcgtctatttgtaccgcgatgccagtaactacaaggtccttaataaggctgtcatccgcggcgagctttctgaggaagaccagaagaccatcctctcctgtctggaagacggcgagtatttcattcccagtcaggtgggtctggatgaggaacggttcggctcctggaccgaggacgaccactgctggttcgagctggagcccggttttgctgagcccaccaacgcggctcccggcaacctgacctgcgagcagctggtgtccaactttttggctgccaagggcaactgggacgatggcagcgaaccggagccgggcccctgagccccctctggcgctgttgtccaccacagcacgactgtctttttttggcagcctctgagaggacgaaaaaacctccccttgcggggaggttttctttgctcagagatcagtccgtctcttcctcatcggtcgtccagtcaacccgggacgagctgcaggcgctggagggcatgagctcggacgccagcgagaagatagttttggcatgggtcagagattccatagccgacatcttctcctctgccttctgaacttccttcttggacacccaggcggagaatacgcagttgtcccagctggccatggcgtatgcgtggatgaggtcgcaggtgcggcccagctcggtcacgattcgaatgtcggacagcgtatggccagagcgccgccattccttctcggccgggtcgtaggagatccgctctccagattccttttcggcatagtacatcctggcaaagactttggcgtatgtctcatcggagatgccagactccatgaggatttcgtggatgtcctccagcaggtctttgtcgttctttgcgagggctagggcaagcgcatagttttcaccggtcataaagggaacacctccttctaaaaatatcatgttcacaatatatgcaaccgcaaagaagttcattccggtggatgagggtttcctgcatattttggacgaaaaacgcaggatggcggcgaaattggagcaaatcattgccaaccaggaccgttgactacataggctccctacaggaagctcccgaactttagttcagtgagagaatcagaataatggggtaaggctccgccgtttgcaacaacggcagatagtcaactgccccgacccataaagggtacggggcttgttaagggccctaaccctccatagtttccagggcttgtagctcatcgcatttggtccttgcgtcgctcccgaaggagtgctcccaagcgccgcttttacatgcggtacctgcggtacagcaggcctatggctacatcaccgggtggttgacaacacccgttttttagtcccgccaggatgtacccggcaggaatatttggttagcttgctttcctcggaccaaacctcgggtttgcgtctccggacacatacagggcgcccaggaactggaggttcattgcgccgagtctgtcatcgttgctacggtagccgcaggcatcacacacatattcatgggtgtcatggtggcggtttgccttgcggattctgccgcacttggggcaacgctgagaggtgtacttgggagacatctccagcacttcagctcccgccagcttttttcgttaaaaaggatcggctgccgcaagagagttcctccagaatggtcacattcaaacctgcatacaatgaaacatgcttcaattttggataagcaaaaacaaaaggaggtacagcgatgacatatagggcaaaattattcatcgacagagatctggcctgcttcatcaataagcagctgtccatctccgaggaggatgccgagctggagagctactacgagcgttccttcgagattcccttcctcaatggaaatgtggccgagatccggttctgttttgacggttccggctgggcggacgggcgcctgtacgaccagaatggcgatatcatctaccaggacgagccatcgtccgacttcttcggaacttggatctggacttttgcggatggggacccgagcgtggaccttgacacctatgccatcgaggtcgtccaggaaggagctgaaaagacatgacctatcgggctaagctggtcatcccagtggaggaggcgacccaaatcgaccattggctttccaatgtaggcggcaagaaagagtccacagtctgtaaagccagctatgaggttccgttcccgaatgggtataaggctaaagtctacctgatggctgaccttttctcctggactgagggctgcctctgcaatgagaagggagaagttatcaacaagacccagtctcagaacttcttattcgatacctgggtattcattctggatggcgcctgctacatggtcgacattacccgtgaggacgatttggagactgacctggacaatatagccagaactatctgtgcagcgcttcgccgcatggatattgaagtccaggatattggggatggagactcccagaagaccatcttcgtcacctcagggctgttcaccgaccatgagttctcaatgggcgtgccgaaagaggagtgggacgatgacccatataccagcgtctcccggagactggcgaagatgcttcagaatgacagcctgaagttctcagaggagggtttcaggagcctggttttctgaacaagaatagctgtgaggctggctgcatacaacagattagtcccccaattttagagacgaaacaaaggtgaaggagaaaacaaaggaatggggtgagcatccgctctccctacaacaatcaaggaggcaaagttatgttccagattttcgagaacggcaagctcgtttccaagatgcagacccgtgaggagttgttccggtacttcatcaggcgcgacctgaatgtgtatgtctgtactgcggaccagatcatgtcgtacacgccctcggcgttccagcttttagcgatgaaccccaacgaccagtatgcgccgggcgcactgtatggcaacttcctgtccttcagccggctcccgctctatcccaggcccattatgatcctggaggatggccggctggtggatatccgtccctggctgccggaaatcagggactacctgatccggtggaaggctcagatcgagaagcatgtctgcggcctcagtttcagcaccggccataagcctaagttccggcacatgtaccgccggcccaagggctacaagcagtcgcagcagggtctctcccctgccgatgcggaggagattttggaagtcatggccaccatcccggataagctccggaaggtgaaccacatggatgacagctgctgctggaagcagcacagccggtcctggaaggagaactcaaaggcccgcaagtcctggcagaagctcaagaggcagaaagctccggccagccagtgcctgcggatgctggatactatctgggatgagctggatctggaagaagacgacaacactgtcgcctaaaaaaataaggaggaataagattatggaaaagagtaggaaaaaggaaattttggagaatctttgctgcaaggagatcatcttcgcgttcctttgtatcattgcctgtgtggttctgttctttgtgcgggcatgcttcccggttgggacggtaattcggacagccctgggtctggtggaaactaatgtgggcgccctggccattctggtgctgctcttgagcgccccgccggcccggcgctggtgcctgtggctgtatgcggcgtttgtgtttgaggccgtcgccctggctggaatcggcattgcgattgcttccggtgcggcaatcgatgtcgtcgctgcgctgaatctgtccaaccttgtgatgatgggactctatattattggctgcattggcggcacggctgcgatgtccaggaagaacgacaaaagcaagaaacctgcggaatgatgcaaaagctcccctgtccggaaggatgggggagcttgtttttgggcaaaagaaggtcctcatttccgtttcctgcgcagttccagctgcaagagcaaatgtgttccagggcaacaaaaaatgcccagaggatttctcctccaggcacttctttcgctcagccaacgatgcgcatgatctggcgaatggcatgatccaagctgccattattggacacagtccagtcacacaaccgctcattctccatctcctggtccagggtcatcagccggcgcgtcttatcctcattggagatgtcccgctccagcagtgccagaacgatatcttccttgctgcggcgcacgaacacgcttacgcactgatcgccataggcagctttgcaggccatggcaccgtggatatccacaggtttgatggcgatgcggccctcggcccagatagcctcgatttcctgcttggcgatggcatagccatggccggcgtaggtggtgtgctcaaccaggctgccatcgtcgatggccgcattgaattctgcctcgctcacaaaccggtactcctcggcgtcagaaccgtcagcccggggtgggcgggtcgtcagagccttgactttacgaaacagcgggttcttcaccagctcatcgcagatgaaagacttgccggacgccgaaggcccaactaagcagatcatccccgggtggccggccgaacccagtttgatgggctcggcggtaggcgccagcgaaacagcttccaccagcttgatgaactccgcatagctgccggcccgcaggaagccctccatggacttgttccaaggacgggtaaagagaaccgggtacttagccgggctgctggtgatgttgtagtcggcatcatccaacagaaaatctacatgcagcaggtctttgcggctgcccagcatcacattggactctttgacgcccgggagcagtgagcaaatctgcttgccgcggatccccatttgctcaggcggcatcgctgaagcaatgaccacttcgtggccagctgccagcagctcctccaccatctcagcggcgcccgggtacaggacctgggagtcgaagaagtcaggctccttgaaaatggccatgaggccgtcagccagctccttggggaagttggcaaacgagtagagggtcacatcctccacgctgaccggagttccacgctgggtcatcttctgacaggccaactccgtgcagggagccagcacattgtcccagtcaagggcgatcgtcagctttcttccgatgttcatattctatctcctccttcacatcctgaccgaacagcagaagtcgtccggcgagaatacggttccctcataggccgcaaaaacagcctcgtcgctgatggtttcatccgcgttggcaagctcgccgtaggacggccagtcgccgttttcgaccatgcggtcgaacaggaagctctgcttcagctcataaagctgatcgcgggaaaggtctcttactctaaacataatgaatgcctcctaaattttgttttgtttttctccatgtggctatatgtatatcctgaattggggtactggactatcctatgcaaattggctacgagcgattttgggaattgttaggtcgctggcgcaggtttgttctgtgttgtacaaaacaatttgcaggtttcgctgttgtgcaaaacaatctgttcgacgaaacggtttcgctgaagcggttcgtcaggattgtccggcacaaccttgcatacgatagcctcagaaccccaatttggagattccacaaacctgaaggagagattaagagaaatcggagaggatggggttccctcttgtcgaacaaaatggcctgcggcaaggcagctatccttcctttacaaagaaaggatggacacccatgaagactatatttccaacttttgccgcagcagatttcttgtctttttcggtctgcatgattgtgcttttcggcttttgtgccgggatcatcctcctgaaggcctgggttaccaaactcagcaaggatcgggacatggcccggcgcgctaagctggaccagatgatgcgcgcaaatgcgaccaacgaagcaaagagggcggcctgcgtcatcaaagagatgacacagaccgccctaagcaacgaagacataatcatgctctattgttcgataattgggaaccacaccatttcgacatacggagatgatctgtcttcacgctccgaggagcctgaaggcccctctgtaaccctcaacctcggagggtaactgcctgtagccaacgcactgcaatgcgtttggttagcaggctattggcatagtatgcaggagatattttttctatcaccgctaagaatgatacagcttccgattttcgggagctgttgctttttgtccaaaactagaatctcttgcctccatgcaggccaagaacaatgccgatggcctcggaaatgttgctgacattcgtggcaacaacgccgcccgggccagacagcatggagccgcaaagattgtagctggtgccatcggagcaagagattaaggatccagtctgggaaatagtagttccgtcttttgcgatgaacacgggactcgacctccttttcgttggatatgggctatcctatgcagattgggctggaatgattctcgtctgcaggagcgctcgggcatgggagggtacaagcatcttttttaacgaagaaaagtggcgggagttttgcttctgctaggaggctgcggcacgagcggctccgttctggagtctatgtagggtccgtgtggcttgcaagtttccagcaacggcaaagacagtcggctgtagtgcaaaacaatggaatcccacggacccggcatagagttcccgcaagggaaccggctccagcgggtgataccggcaaatagcacagaccccggcagaatttcttcgttaaaaaagaccacctcccctatcagagcagaaagaagcccgggacggaggaatatctgccctgggctctcaaccaatcaatgattcgatttcttaatgttgcagggcgtgcagagcatctgacaattctcccgcaccgtcttcccgcccttgctccacggcttaatatggtcggcgtgcatgtccttgaagtccttggcctgcccgcagatggcgcacttaccaccctgggcatgataggcggacagagcgacatcgctgtcgaactgccggatgttgagatgcttttccttgccggtgagcaggtagggatagatgcctgacttcttctgcacctcgctgtcagccagcagcctctttacctctgcctggaggaaggccggatccaggttgtcgtccttatgggcgttgtacaggtggccccaggggacgcccttcatggacttgtcgacgccggcgccgaagatccgctggacccagtcgaagacggcctcaaaatagttccagagctcatccgcattcggatcattccggtgggcctgcataaactggacgatggcgtccttgccggcatagccctcctcctccgccttccaggcaaaggccgtctccaggtacttctggcggatgtagtcgccgaccatgtacttaccgtacttgcggtgggcggtgcagttgcggcgggagaaggccgatttggcgttggagagccatgggccgtggtacagggcattgcggctctcctgctgctccagcacttcgccggcaatgttgataatctggaaccagtccagcttctccttgtcggtcccctcgcagatatacacccgcagcgggtagtccaggaaagcctccttggcggcggcgcccaggttgttgaagttcaccatgttgaagccgcctgtggccgcaaggatacgggcagagatggccgagttgatgatgtagcgacagatggagatgatccgctgctggccgtccagcacctcgaaggtgtcgtcggggcggcggacaaagtacatgatgttcagcgggaactggttcatcaccgtgttgatcacggccgactgctgcttctcattgtagacgaattcccgctggtactcgggacggacatccaggcagccggacatggcagagacgcggccagaggagtcgtcttcgttgtattgggcgaccaggtcgcggatgggaaggttcatttcattgatgatcataaaattcttcactttctttttggagaagcctgtcctctatgtcccaaaggttttgccaaatctcgaatagcgtcagcaaaaacaggtcttccattgtttctatgctttcgccgctccatgctccagggaacccaaagtctgtggcagaatcatcttccggcaacgagagtcctgaatgtttagccaccgatatagcagtacaacaagctatcatgatcgcctcatcattggggacggtttggaagtgcgtttcttcgatgatgcgggagtacacatctccaggtttagactctggagacaggattgcttcctgtataatatccgataccaggtttcctatagcatcgaagttagctggtgttttgagatttttatggtcgctaatggcatgctctatatgtttcccgctgtcatagaaaatactgataaatttggagtttgaaaggaatattttcgatgccatttctagcctcgcaatgcaagactggaaaaacttgtcatcccttatgtcgcacattttccatccacaccgggaaaatatagcggttcggacatccatcggcagcaagatgaagtcgaaatacatttttctggagtacgggaaagcatcgttataggatgccgcaattgcacaaaggggcagcagcccaatcgtctcatgatattctgacaggaatttccgcaccatggcatccacggcctcgctatggcgctgtcgttcagtctccatttggtcgtgtgacaacttgtttatcttggcattttggcggcattgccatattccgataatgattgttgcaaccactcccgacactgaacaaatcaggtcgatcacttcgcacgcacacatgcccatcatcccgctttctccaaataagcactctcatacatgtctttttcccacacgccgtccagcgcggtgtgatgcgcttgtgttcaccattctcattgctctttgcatccttcgggttgttcttgagaccgacaatgccaatcgaacaagagtgctaaagaggtttttctaattttctgattttcacctgatgatagcaacaggcgatataatttcacagccatcggcaaatttgctcttgtctggctcgtcttcataacacgcttctgtattgctaataatttccataacaagctgtgggatactcttaaagaaaataggtgtttttcagtacccctccgacaaagatagccggccctgcgctcagatcgctataatttgggttcttggctttcttggcagcagtgagattcttgtttttggccatggtgcagtatccctctttttcttcttttggaggaatactatgcaatttggtcgaaagctatttgcagaaacaaagtccaaagaaagccctccaggagctcgctggacggccgtttgtcctggggaatatcccaggactcccctgcccctcccgcagccgtcacggctcgcctgtgcccgcagggcgccggaaaacagtttccctacggagtctaattgccaataggactgcgaaacggtttcgtgcaacaagaaaaagtcccaggaatgccatctccgcactcctgggacctatccataccgaaaatcacgcttcagctaactcttctcctacctctcctcgcagccgctctttcagcattgtattgcgcttggtcgtcacctcatgccgcacggcatactgcagggccgcctccgagccaaccaccaccagcagtttcttggcccgggagaaccctgtatagaccagatgccgctccagcataatgtgattggtattatggatgggcatgaccacaatcgggtattctgacccctgcgatttatggacagtcgccgcatacgccagcgagatatcgcccaaatcagaggtcgagtaggtgactggcacgccatcgaagacaatgatgatctcatcgtcctcccggttgatagataggatattgccaacatccccattgaagacattcttgtcgtagttattctgcatctgcatgaccttgtcgccgatcttgaacatcgtatcgccatactggacaaaaatcttggagtcattcagcgccgcctggagccgcttgttgagggcgacggtgccaatatcggaggttttctgcgggcacagcacctggatgtcgagcgggtccacctcataggtattgggcagccgcttacttaccagctcctcgatgagccgcggaatatcatccttgttctcagcccggataaagaagaaatcagagtccttcttcacccggatatcaggcatctgcccctcgttaacgcgatggcagttttcgatgattttactggtaagcgcctgccggaaaatcttggacagccgcacagtgggcaccatctctgagtcaataatgtcccgcaggacattaccggcgcccacagagggcagctggtcgatgtcgccgatcaggatgacccgggtgcccgttttcaaagcccggagcagagcattcatgagaaaggtatcgatcatagacgactcgtccacgataaccgcctgggcgtccaagggattggtctggttgcagagaaaaccatcgtcaggacgatactccagcaaccggtggatagtcttggcctccatccccgtggcctcctgcatccgcttggccgcccggccggtaggagccgccagagccaccttgagcttgttctgcagaaacgcctcgataatgccctgggtcacagtcgtcttaccggtgcccgggccgcctgtgagcaccatcacctgagaattcatggcactcataatggcgtcagcctggagcggatcataggatatcttcagcttggtttcgatcttggcgacctcagccttcagcaccttgggtttggtcatcagccggtccagattgttggcaataccgatctcgcagtaccgaagctggggcagataaatggcggccgccccctctttgacgacctcacccatcttcatcatctcgtcgatagtcgcctggagttttacctcatccacatccagaagctgaatggccttgtggaccagttggtcgcgccgtgcgtaaacatgtccgtcattgcttacctgattcagggtaaacaggacgccgctgcggatacggacatagctatccttatcgatgccaaggctgcgggccagctggtcagccatctggaagccaataccctgcacctcatcggcaagctggtaggggttcttggtgatgacagcaatactatcctcctcatagtgagcatagatgcgggctgcataaccaggcgtgacgccgtgtccctgcaggaaaatcatcacatcctggatggccttgtgtttcttccagctctcctggatcttcttcagccggcccttgccgataccgcggatgatagacagtttctcggggtgcttgtccagagtctcgatcgtattggggccaaacgcctggacgatcttgtgggcatatttccgtccgatacccttgcagaaattggttaggtagagctcaatgccatccagatcctgcggcgccttacagatccagtggtcagcctccatctggcggccatacttgggatgcgtcttccactctccctgaacagtgagggtgacaccaggctgcacatcggccataggaccagtgatggtaatatagtcgtggtcagtgatgcagctaaggatggaaaagccattctcagcactgcgaaaaacgaccttgtcgactctgcattcgactgtatccatgtattcttatcctcctttcgggagttgttctctcaatatattatatgcggataccatgtttgatatttttgatgtcagacctggggagttgagtcttttttaacgaaggaaagcagcggggattagtttgtttgccggaaactgcggtgcgggccggctccgttccggagcttatgctgggtccgtgagatcggccccgctcccctgctggtatcttcgggaactccattgttgcacaaaacaacgagattggcaaatcgttgtctaaaacaacggtctacgcgaaaccgtttcgtctgcgccaaagcagctgtctcacggcctccacatcagcttccgaaggaagcggctccggcgagagtaagcggcaaaagaaacctcccaccactttcttcgttaaaaaagaatcgactctccgccaacaaagaccagcgacaccgtttcgcatagcaaaaggccccatggatgccacgcggcacccctggggcctctgatatctaaagtagctcaatgccttcgctgtggcttgccctgcccatttttactgccgtctcccccttctggtttcgacggctggttctgaggatcagtctcccggtacttcagcatctgcagggtctcattgggtttggtcctgatatcggccaagatcgcaaatgcctcggtaggtgtataacgcagattcttcatcagccgcgcaggcgtataaccacgccggccaaagttggaagcagccttggaaccgctggtagcaaacaaagcgaacgccgccatgacctcggggtccttgtcaaacttcgccatttcatccttggcttccttggaactgatcttcttatgctcgatgatccagcccaggactgtctgccggtctgcttctgctttctcctcaggagtcatatcctggagcttggccggcgccggtttctgcccagctggcttctttgccgcctgagcagcattggcttcagccttggccagcgccgccgccatctcctctgcagaaggtccgctgtcggcgctgccggtagccgcacctttgatggatgccagggtagacagaggtttggccggctccaaaccaggcagcacatatttgttaccgacattcatatccaagttggtgctgctcaccatctggaagggtttatcgcggtctgggctggtaaaggtcagccggaagacattgatcccctccttgttcctggtctgctcgatctgtgtaagggtaaagacctcctcccatgcccggttgcccttggcctgaaccacctcgtattggtctagcttcgggtgcgacttcagcatctcacgaagctccttgcagtccttgcggaacaggtacaggaactcatagagcccaaaatagcggagatatttcccggcaatatccatgggcaccgtatccttggttttttcagagataaacatccgggtgtagccggtgttcagccccagccgttcatccatttctactgggtcgatgcgattggcaaaaatcagcttctcaaccagtgagtgcagattcaggtagcactcggccggatccagcttccggcgggcggcccgggacggctcagacaggacccgccgaacctcctccaccaacaccaggtttgcattggtctcaacctccggcgccggttcaggctcctggggcggtggaggaggtggtggcgtggcgccgagggccggttcttccactacttctttcttgtcagggtctgtgatggtggatgccttatcgcgttttacgccgcccacaaagcaggtgacattggcgatggccttgatgggagttttaccacacaaccatacgcgggtgatgaagcctttgcggaaatagttgttgataatcgaattcaccattgcctgggtggttttcatgaccatcaaagtcccgtccttctgttgagcgtgaatggacagagcgtagaaatcggcgtccgccttatccaggaacagccggatggccttgttctggacagcaataccaaaggttttctgaacccactcctcggcggtcgtgtttgggtcggccaccacatagatggccccatagctgaggaacgagtggacgagagccgcttcttctccttcgtccggattcggctccaggcgcagacggaggatctgacgggtcaagtaggataaatcttttgtcacaggaatacacactcctttcgggaaaagggccggagcacatgccccggcccagagatgtcagatttggctcagcagcgggttccgtccaaggctgggcttcttgggcagcccctcatttttctcgggatccggccggaagctgatggtccgctccggatccacaggctgcggctgcggctcgggctcaagagctggcttcggctctggcttgggcttcaggtttggctgcgtagccgactggaactcggcagcccagtcttccactggcgctttctcctttgccgggaggatcatcttctccttctttccagtcatcttcccgtttacagaaacgaggaactctgaccagatttgccgcataacatctgccttgggcgggatctccttatcgccgaactttaacgagccacggatcagcgactttacgaatggagccagcatatggccgttggaccaggcctcatccagcagatcgcgggcctcatcgccgcggatggacaggttgactacgctgccgatgacaaattcgccttcagggccgcggatctgccagccgtacttgaacccacccttgggctccacatggtcgcccttctgggggccgtcgcggatcagaggcgcccgggtgtccacaatgccgattttcaggggcttccccagggcattggcggccatcagggcccgcacccagcgcgcccggctctgtccgctgcgctgcagcaggttgaaccaggcggcaatgtccttgtcgccttcaccgatataaataccaatattcgtgcatgtgctcatgttggttggttcacctccttgacggggacaggactgggcttaactgtccagctcgtccccaaggtcttcgggatcatccagcagttcagtcgtccgcatccggcggctgttcttcgcctgttcgaccttggagaagatcagttccttcacatccttgggccgggcgatgttgaccagatcaagggtaggagtcgtcttgtcggaggaatgcagacttatagtgccaacgccgaagatacgctgaatgaagctgcgggcgagggtgatatcccgcacccggtagaggaggacttcttcctcctttagattgaacaagcctgtttcccggaaaatacggggcgcctcgccgccgctcagactgtacttggtgaagctgaggggcagccccaaatgacgcttgcggtctttccaaagcatattttccatagcttattcctctcccagcttgccccgcaggcccttgtaggcgcccacgaccacagcaaactcaatcggcagctccttgccggcgatcacgggccgggtaagcagcatgtgctcgtcgtccatgaggccggtgcccttgtagtagtccagcagctgattgaagaaggctgcgccggtgcctccggtgaccaggatatagcggaagtcgatgaggttgtcatactgcttgttcaggtaacggatcaggttgctgcagacagactggagtttcttctcccgaatagccgacaggtcaatattgaccaccttgccctgatccttgtccatgtagcgcacggaagtctcgccctggctgagcaggtactcgactgcatagtgcttgatgtcaggccgggcatcggcgatctccttggccacacccagattgacattcttcatggcatagttggtattgctctccgcccggtcgtcgtccacgctgccaccccgggagacgggcaccagacccatcgtatagtagccgccatcaatgaccagcgtggggccattggccaggtacttgaacttggactcgtcgatgaagccattgtcatcggaggtctcgcccaggatggcggcgatcgtctgggagacagtcatcacattctgctcatggatggtgaaccgaaactccttttcggactcattgtcgaaggtcatgaagaaacgctggtcgcctgccagcaaacccgtgaccgtagaagcatacttgttacggactgcgtggggcaacgccacgatgagccggatatccaggtcctccccatagaggccagtcagctcgatggccttggcgatggccgaaaggatgcccacagccgcctcaggagagacaaaccgggcctctgtgtacagtcgggccattgggtcgtcctggctgtccttgttgtcgtacatgaccgtgcgggcatactgtccaacgcgccaggtggcgccggagctgtccttatacaggatgaacccactccggccgccgtagtcgctcatcttgcgctcatctgtctccacggcgcagaaggggaacttgaaatggatcccattggcaaggaccttcatggaatcaaagccagggtcaatggcgatcaaaagctgcttagacatatttgtctgcctcctcgaaattcttaatatagggcggggcagccgctcctgtcccgttcgaggctataatatgcacattatatcgaagttatttccgcaattttggcgaaagaaaacccgggagaattgctcctcccgggcgtttttgttaacaattgcgccgtaaatcccccggattcatccgtgtgggatataaggcgccatatgactttctccgaaagccatgatgctcagacaaagaatggtgtgccaaaatataaattcgaggaactgcatataataatatagcaatagggttgcgatacaaatttttcgttctgaaaggaggcggtgacccatgaaacagcagcgggcggtgaaagtggaactctaccccactgatgaacagcgcattctgatccataaaacatttggctgtgttcgcgctgtatggaacgacatgcttggcgacgagcaggagttctacgccgccaccgataaacatttcatccctaccccagccaagtataagaagaaacgcccatacctcagtgaggtagacagtctggccctctgtaatgcacagctggcactgcaaaaggcgttcaagcggttcttcgagaaccatggacattttgggcatcccaagttcaaaaccaaaaagaaggctaagaaatcgtacacgacaaactgccagtatcatgtttccggccccacagtctacacggcaaaggacgccatacggctgcccaaactgggtctggtgaaggctaagctgtatcgcaatacccctgacaattgggtgctcaagtcggccaccatcagcgagactaagtcgggccgtatcttttgcgccctgctctatgagtttgatattcccgcgccgaaggaggtcctgccaaccctggagaattctattgggctggactactcctcgccgctgttttatgtggatcacgagaaccggtccccggacaagccccggtggttgcgggagtctgaagccaagctcgcccatgagcagaggctgctgtcccacatgaaatatgggtcaaagaattacatccggcagctccacaagatcgaagtgcttcaggagcacattgccaaccagagaaaggacttcgcgcacaaggagagcaggcggatagccaacgcctacggatccgtgtgcgtggaggacctggatctgcaggcaatggctcaaagcctaaatctgggcaagtcgaccaacgacaatgggtttggtatgttcagagagttcctcaaatacaaactggaggagcagggcaagcacctcatcaaggtggataaatggtacccatccagcaagacctgccactactgcggcggctactacaaggatttgcagcttggcgaggaggcgtggacatgtccccattgcggcaagcacatcctccgaaaccagaatgccggcatcaatatccggcgagagggtatccgtcagttctatacagagcgggcggctgctgtgaccttcggagaaggtcatgtggtgactttcgaagaaagtcatgtggaacctgcagcatcataaccacagtctaaaatattatcttttgccggtaggagcaccggcctatgcccgctattctaggcagcacggacgggaaccgtgcctaacatgaccgttgaacgggaaaagagaaggcgtaccctggcctatgccaggatacgcctgaagcccccggctttagccgtggggtagctcactatggcagcttatcttctctgcccccataggatgctacgctaagattagcgcagagccgggaaaagccaacatggcgcgcagcttagccctcctgctggtagtacagctccagcgcccggttcaggacctcatctgcccgttcatagtcatcaggccggagttttgtcttcacggcgtcggcgatgcgtggcagggcctttttgaaccggcggttcagctcacgagttttcttctgttgtgctttttcctcctttgtgagcacgaccggcaccgtctctcccggttgttcctcccctaccctctcgaagttctccggtatgatgttctcatgccatttctctttctcggtcccagcatagaccttatggagccaggagaccttcggctctgagagcttgtactccaggagctgctcctgaacatccggcggcagaaaagcaatatgataagcgatacggccggtgacgactccggcatccagcctgtccagccaggggtcgatgaggtcatgcatgcggacatatcgttggatcatacgcagtgtaactgacttgccgcccaccatggccgccacctgagcctgctcctgagccacggccttggtgatctctacattgatggcttcatcggcagaattgccgcccttgatctgggtgtagtaattataccagccatagatgaggtctttgggcgacaggtctcgtcgtagcaggttggtgatgtgaaatatattgcgagcggcatcgtcatccagatccatgatgcggcatggtaccgtctttagcccagcggccttggcgttcgtccaccgctgctccccggctaggatctcgtacttggacatctcgataggtgatttgcggacaatgagcggctccagtaccccatgttccttcatgctctccacgacctgctcctgcaggagagtcccgtatttggagtagtcggaggtccccttcagtgtgcagggatgcagcatttccacaggaatatcctggaaattggaaagggccttccctgctccggccgaatcgatgggcagcttactggctgcggcggcagccggctgctcccggtgttcaaatccaaacttcttcttcgacgccatcttagcctctccccttcatgttcagttttttcaacagctcattggcaaagtcgatgtagtcccttgcgacagaactcttgggtgcatagcggatcagatcgacctgccggttcgtgtactcggccgctgccagcccatctcggatctttgttttgaacaacacagtacccagctctgcggccagctgctcatactcttccatatagctgctggctaggatggttcttcgtttgtacttggtgatgagcagccccaggatctcggcgtgcatatcggcgttctcagccttcatctgctcgatggtatcccggagatccagcagagcggtccgggaggtgtcctccgtgaatacggggatgatgatatagtcagcggtatagaggctgttcagggtgagcagggtcagcgaggggttggtgtccaaaaagatgaagtcatagttgccgcggaccttccgcagcacccagtccaaagtcgaatgctcggtggcgccccagccctcattgaagcgggactccagcagctcatatacctgttctggggtagcgccctgctccttgagggcaagaaaatcgctccggggcatcaaactgcggccggtccactgggtgaggtttggcgaggcacggacgagatcgcccaggttggactttacgatggcgtcctcgattgaacactcctgtttgagcacctccagaatgctcagactggtattgtcccctagtttgattggaccagggccgccggctacagcgctgaagttgccctgcgggtccatgtcgatggacaggaccttatagcctttaccagagaggatggatgccagggaggatgccgtaagcgtcttccctaccccgcccttttggtttgtgactgatatgacagttcccataggttttgtttccccctatgctatataagcagttcgatgagaaccagtataacagaggttgaggtcgcttgcaatcggatgaaggcaaatttctcttgtttttgtgagcgaaacggtttcgcggggatgggccggggaagaaatcccttgcagcatgacattgctgcacaggttgaggcaggtcttttttaacgaagaaa

SEQ ID NO: 342 - DNA, 303397 bp, Flavonifractor plautii
  source 1..303397: mol_type = genomic DNA
cgtaggggcgggtgcccacacccgcccacctcttttgttcccgccccaggctttggccggacgggcggccacaaggtccgctcccacttgtgtccccgcccggattctgctatactcaaaccaacttttccacactggaggcgttttttgtgggatctacccccctgtacgacactctgcgggcctttgccgcccagcggcccctgcggatgcacatgcccggccataagggtaaacccctgcctgcgccggagctggcggccattgcggccattgacttcaccgagctgccccccacgggagatctcttctccgggggcggggccatcggggcggcggaggccctctgggcggaggttttccacatggactcctgcctgtttctcaccggcggctccacccagggggttcatgccgccctggccctggcctgcaaaccgggggagacggtgctgctggaccgggggagccaccgctccgcctacaacgccctggccctgctggacctgaagccggtctatctggagcggccctggcttgcctcggaggggatcaccggccccatctccccctcggcggtggcccaggctctggaggaatacccggacgcaaagacgctctgtataacctcacccacttactacggaatgttgtcagatcttcccgccctggcggagctgatgcaccggcggggcggggtgctggtggtggacggagcccacggggcccatctgccgttcctgggaaatgaccacctctccgccgccgatctggtggtgacatcggcccacaagaccctccccgccctggggcagagcgccctgctgttggccggggaacggtttccccatgccgggctgcggcgggccgcctccctctacggctcctccagcccctcctatcccatgatggcctgcctggatctctgccgggcgtggatggaggaggagggcgccgccgcttaccgggccgccgcccggcaggtggccgccctgcggcgggactaccccagcgtgtccggcccggcgctggaccctgcccggctggtgctccgcgcccccgacggctttgccgcccaggcggccctggaggggatgggggtgtggcccgagatggccgacgcgggccatgtggtgttcatccccacctgcgccgacacggaggaggactttgtccggctccgggccgccctggacgcggtggcgtggggggacggcgctcccctgcccccgcctccgcccccgccggaggcggttctcaccccccgtcaggccctcttttccccccggatttccctccccctgtccgccgcggagggacgcatctgcgcccagcaggtggccccctatccccccggggtacctgttttcgcgcctggggagcgaatttgcaaaaaaactatcgcttatttgaaacaaataggttataatacactggaagacgttgaggttgtttccgaacctgtgtgtgcctcatagaatgagcaaaggagcgtctttccttcaggagggaaaagcaatgaaactgattcttgcgattatcaatcacgatgacgccaacaccgtcacccaggccctgaccaagaagggcttctcctccaccaagctggccaccaccggcggctttctgatggcgggcaacgtgaccattctcatcggcgtggacgaggagaaggtgcagaccgtcatcgacatcatccgggagcattcccacagccgcaagcaaatgatacccaccaccaccgagatgagctacggctactacccctccatgcccgtggaggtcgtggtgggcggcgccaccatcttcgtggtggatatcgagcggtttgagcgggtctgagtctttatgaacctgacccggctggcgggcaacgccccgctgaagcggcagctggagctggagacggcccggcggggtctctcccacgcgtacatcctcagcggcccggcgggctccggcaagcggaccctggcgggcctgctggccgccgccctggtgtgcgaccgccggggcagcgctttgccctgcctgtcctgcgccggctgccgcaaggcggaggggggcatccaccccgacatcgtgcgggtgggggacgacgggaaggatatcagcgtggcccaggtgcgcgccctccgcgccgacgcctacatccggcccaacgaggccgaacgcaaggtctacatcctggagaacgcccagaccatgaacgccagcgcccagaacgccatgctcaagctgctggaggagggccccgcctacgccgcctttctcctgctcaccgacaacgccgccgccctgctgcccacagtgcgctcccggtgtgagcatctccccctctcccccgtcacccggcgggaggcggagctctggctggacgagcactaccccgaccagccccaggcggcccggcaggccgccgccgaccgctgcgagggcctgctgggccgggcggccgccgagctggagggacaggccgcaggcgacacccaggccctggacggcgcgctggagctggtgcgccgcctggccggcggtgacgagctggccctgctggagcactgcgtggccctggagaagtgggaccgggagcagcttcgcgccctgctggacgagggcgttctcctgctgcgggatgccctcgtctgctccgccggaaccctgcgggagtccgacccccgccggcgtgaggcggcggagcgcgccgcctgcgccctctccccccggcagctcacccaggcggtgggcgtgctggagcggctgcgcgccgcctgcggctccaatgtgggggccggtcacctggccggctggctgggggcggcactgagcaccctatgactgggcgggcccgaccccgcccatacacctgatgcggaggtaatcatgaccgaaatcatcggcgtccgcttcaaaagcggaggcaaacagtattattttgaccccaatggacaggccgtggcccccggtcagggggtcattatcgagacctcccgcggcctggagtacggcgagtgtacccagggcaacaccatggtggaggacgaggcggtggtacagccgctgcgccccctggtccgcctggccacccagaaggatctggacaccgtggcgaagaaccgtgagaaggaagcgcgggccttttccatctgccaggagaagatcgccgcccatggcctggatatgaagctggtggaagtggagtacaactttgaggggaacaagatcctctttttcttcacctccgaggggcgggtggacttccgcgctctggtcaaggatctggctggggtattccacgcccgcattgagctgcggcagatcggcgtccgggacgaggccaaaatgctgggcggcctgggcatctgcggcaagcccttctgttgcgccaccttcctggacgagtttcagccggtgtccatcaagatggccaaaacccagaacctgtccctcaaccccaccaagatttcgggcacctgcggacggctcatgtgctgcctgaaatacgagcaggaggcctatgaggacgcggtgcgccgcatgcccaagaacgagtcctttgtggagaccccggagggggtgggcaccgtctctcaggtcaacctgctcaaggagaccgtgaaggtacggctggaggagcagcccgaggcccccaagtgtttccacaactgcgagatctgcgtggtgcgcaacggcaaggggaagctgcccgagggctatgtgccccctcccccggaagagctggccaagctgcgcaagatcacccctgtggaggagccccaccgcctgtccggcagtgtggacgccgccctcagcggcctgggcgtcgcccccgccgagccggagaagcccgccgagggaggggagcgccgctcccgcggccggggccgccggggccggggcgggagcaggccgtccgccgagtccgccgccaaaaagcccgccgaggagggcaggcaggctcagccccccaggcagaagcaaaagggggagcagcagcgtccgcctcggccggaaaagcagcccaaggcgcccgccgcaccatccccggcctccgatgggacagcggcccttcccaccggtgagaaaaagcgcccccaccgccgccgctaccggggcaagcccaagggcgacaggccccagggcccgaaaccggaatcctgaccggcatgagacgggcgggcgctgtatgcgcccgcccgtttgtttgaggtgatttgctatgacggaatatcagaaaatgctgggcggccagctctacaacgcccaggacggcgagctccaggccatgcaccggacggccatggagctctgccacgccctcaaccagctcaaccccaatcagaaggaggaggcccgcgccctgctgcagcagcttctgggccggaccggcgaacacttcaccatcaaatccaccttctggtgcgactacggccggcacatcaccatcggcgagaacttcttctgcaactacaactgcgtgatgctggactgcgcccccatcaccttcggtaacaacgtcatggtcgcccccaactgcggcttctacaccgccgcccaccccctggaccacaccctccgggacgaggagctggagtacgccaagcccatcaccgtgggggacagcgtttggatcggcgggggcgtcaccgttctgcccggcgtcaccatcggcagccgcgccgtcatcggcgggggcagcgtggtggtccatgacattcccgagggggttgtggccgtcggcaacccctgccgtcccatccgcaccctttaaatgcaaaaaggagctccgccttggggcccataccgtaaggaagttaacacccgccaaaagaagttgcttttcggcgggtgttgccttatattaatttcaccgacaacgcggagttaggagagatacaatggatagaccggtcacaacgctatttatgcttatgtctgttgacggaaaaatcagcacaggggcaacagataatttagatttagacagagatctccccaaaattgcgggcgttcaagaaggactgcaccagtattatgagatagagcagacaaccgatctgtggtcgctcaattctgggagagtacaggaaaagctaggcgtcaactccaaggaaatgccgaacaagttgcctgtttcctttgtaatgatcgacaaccatcatttgaccaaacaaggtattcgctatttttgcgcccgctcaaaagaatttgtgctggtcacctccaacgcagaccatccagcgtttcagatggatgaggacaaccttcatatcatctgtcagagcaagttgtctttacctgacgcgcttgcacaactcaagtcagaatatggctgtcaaaggatcaccatacaaagcggcggtacattgaacgggctgtttcttcgggaaaaactgtttgattatattgatattgtgatcgcccctattttagtcggcggcaaggatacatccacactgatcgacgggaggtctttgctgtcagaaagtgaattatcccaattaggcgtgctgaaattgcaggaatgtatggtcttggaaaactcgtatctcagattgcgttaccaggtgatccattgacagcttccagtttactgttctttcccacgagtactttccccgaaagtgtcatagcgggttacatactataaaaagggcaagacagaccgtaatggtttgtcttgcccttaacttctttataaagccatgcccttatggcggagctcttttttatttggccagcatagcagctgcaaaggcccgcgcatccgccaggtccgtcccgtcggggtgggacagggcctggtcataggcccggagcatgttctccagccgggcgtcgccgggcttctccttgagctgagtctcataccgggcccggacggcagggggcatccgccccggacagaaccaggtacccaacacctgattttcctccggcacctccgcccggaaccggtcggagagagaggcaaaatacatctcagacaggccaaaacccgccgtgccgaacagggccacccgcttcccgtggagtccctgcaaaaactcctttaccaccggggcacaggtgcccttgtccgtccaggagcccacaaagatcagctccgcctcccccacgtcccgggacagcgggccgaaggccacaatctcatggccctgacatccctcgcggatggcctgggcaatctgggcggtgttgcccgtctcgctggcgtatacaatggcaattttcatcatgtcctcctctgaaaaacggcgggcggccacaagggccgtccctgcggtggcaataacgcaatacgctgtccggcgggattgatccccaactggcggaagccccgctttatttgctatgcaaaagcatcgcagaattggccatgcgcccgcttacagcggcacggccatgggatgacagcgcgtgggccggtacggcccacatgcacaaacacttcatgcgcctgagcctttgcacagtttcgtggcgcgccctgtgcgcatgaagtgttatgtacggcacgagcgccgccccgctttagcggggccccaagggcttatttatattttctgctctccgcaaccgccagctcgtcacagcggttattatggggattatccgcgtggcccttaacccagtggagacggactgtgtggagctcgcacagcgcgagaagccgctcccacaggtcagggttgagggccggcttcttatccgacttgatccacccacgggccctccagcccttggcccagcccttctgcagggcgtcaatgacgtacttggaatcggagtagagctccacctcacagggctccttcagcgcctccaaggcagtgatgacgccagtaagctccatccggttgttggtggtgtggggctccccgccggagagctccttgcggaactccccatattgcaggatggccccccaccccccggggcccggattgcccgaacacgccccgtcggtatagatcgtgactgttttcataaatctcctatggccttcccctgggggaaggtggcacggtgcagccgtgacggatgaggggaacgccccttcaaccgccaagtgaacggctttacacacaccttcaaactttcctttgatctccgtatttggaaagcgcagaacattgagcttccacacatcccgcaactacccggtttgtgtgagatccgccttctgtctctcacgctcataatgctgcccgccgtccagctctacaacaagcctgactttatggcagtaaaaatccacaatataggggccaaataccttttgccggtggaatgggaccggatacgcccgcagaaagtcataccaaagatgattttcctctctcgcggcatgtttccgaagccgctgcgcaaaggcgcacggcgctttctcaccctgtatgtcgccccaccttcccctcatccgcccctgcggggcaccttcccccaggggaaggccttattgatccgcctgggcagaggaatcctcctccggtcatggacagcggaaagagagacccttttacaaatcctccaggatggcccgccgcctctggtcgtactcctcctgggtgatcaatccctgttcgtagagggtctggagttgacgtaggcgttcctcaaggccgccgcttttttcaccgttttcatcctctatatgaatttctggtcccacatagcccctaccgaaggcctgataaaagttcataccggtgataccggcggcaatgagggtccacagaataccgaacagtccaaacgtgggaatgaccaagaacaggccgatgcatacaaagatgatgccaaccacgccgccaaacacggcctggctcttgctggggcggtaagtgacgcgtctgcggcgcatggcttactcctcctctgtaccaacggcaggggaatccccctcagcggcctcctcttcctcctcgtggtcggtacgggcgaaggagatcaccttgaccccctcctccaaattcatgatcttgacgccctgggcggtgcggccgtaggtggagatgccggcggccgccatgcggatgatcacgccggcatcgttgatcaccagcacgtcgtccccgtcgctgaccaccttgacccccaccactggaccggttttctcggtgacattatagcccttcaggccaaatccgccccgcttctggggcccgtcggcgcggatatactcgtccatgtcggtgcgcttgccgtagccgttttcggtgatcatcagcacctggtggtcccgcttggcccgggcggcccccaccacgtagtcgccggggcgcaggttgatgccccggacgccggcggcgtcacggcccatgcagcgcacgtcggtctccttaaagcagatggccatgccgtcgtgggtgacgatcaggatggcctggtcgccgtcggtctcccgcacgcagatgagctcatccccctcgtccagggtgatgcagcggatgcccgccttgcgtgcagtgtagatggaggagagctggatgcgcttgacggtgccgctgcgggtgaccatcaccagatagcggtcctcggggaattcccgcaggtggatcatggcggtgaccttttcatcctgctcgatgggcagcacattgaccaggttggtgccccgggcggtgcggcccgcctcggggatctgatagcccttcttgcggtggaccctgcccttgttggtgaaaaagagaatgaaatcgtgggtggaggcggtgaacacggtgtccacatagtcctcctccttggtggacatggcggtaatgcccttgccgccccggcgctgggccttgtaggtggaggcggcggtgcgcttgatgtagccgccggcggtgagggtgaagacgcactcctcctcctcgatgagatcctcgatgtcgatctcgtcctccacgtcctggatctcggtcacccggtcgtcgccgtacctgtcccggatggcggtaagctcgtccttgagcacgccgcggatcttctcctcactggagagcagctcattgaagtaggcgatgcgcgcctccagctccttgtattcgttttgcagcttctccttctccagcccctggagccgcttgagctgcatgtccaggatggcctgggcctgcacgtcgctgaggccgaagcggttcatcaggttctccttggcgtcgtcgtagctctcccggatggtctggatcaccgcgtcgatgttgtcctcggcaatgagcaggccctccagcagatgggcccgctcctgggccttgcgcagatcgtagcgggtgcggcggacgatgacctcctcctggaaggcgatgtactcgtccaggatgtggcgcagggagagaatcttgggctggggctggccgccggactgcaccagggccagcatattgatggcgaaggtggtctggagctgggtctgtgcaaacaggcggttgagcaccacctggggattggcgtcccgcttgagctcgatgaccacccgcatgccgttgcggtcggactcatcccggatgtcggagatgccctccagccgcttgtcctccacctggtcggccatatttttgatgagcatgcgcttgttgacctggtaggggatttcggtgacgatgatgcgggtgcggttgttgccgaactcctcaaactcggtacgggcccggacgcacacccggccccggccggtggcgtaggccgcccggatgccggagcggcccatgatgatccccctggtggggaagtcggggcccttcacgtgctccatcaggtcggacagctccgcctccgggttgtccagaacgcagattgtggcattgatcacttcccgcaggttgtggggcggaatattggtggccatgcccacggcgatgccggaggagccgttgaccagcagattggggaaccgggagggcagtacccggggttccttccggctctcgtcgaagttcgggtcccagtccaccgtgtccttctcgatctcccgcagcatctcgtcggagatcttggccatgcgggcctcggtgtaacggtaggcggccgggggatcgccgtcgatggagccgaagttgccgtggccgtccaccagggggtagcgcatggagaaatcctgagccaggcgcaccagggcgtcgtacaccgaagcgtcgccatgggggtggtagcggcccagcacgtcgcccacgcaggtggccgacttcttgaagggcttgtccgcggtcaggttgtcctcatacatggcgtagagaatgcgccggtggaccggcttcaggccgtcccgcacgtcgggcagcgcccggcccacgatgacgctcatagcgtactcgatgtagctctgctccatctcgtgcaccagataggaggtctctatcttctggtctggaaaccggatttcctccggatcatactgtggctttttactcatgtatctgcctcacattcttcgtgatagggtggttcacggcgggcggccgcaagggccgcccctacaaattgcgggtgggcgtttcgctgttcccggcgattttttcctttgtaggggcggatgccttcctccgcccgtttttgttgcctgggcggcaccggaacgtcaggccgatgtgggcatcggcccctacgatacgcgttccggccacgttgtccgttccccaatcccttaatagtccaggttgacggcgtacttggcgttgcgctcgatgaactccttgcggggctccaccttctcccccatgaggacggtgaaggtctggtcggcccggacagcgtcgtccagctcgatgcgcttgagggtgcgccgctccgggtccatggtggtttcccacagctcatgggggttcatctcacccaggcccttgaaccgggagatgtccaccttggcgttgggattgtccccccgcagctcggcggagatggcgtcccgctcctcctcggagaaggccaggcgggtggtcttgccgcggctgagcttgaacagggggggcacggcggcgtagacgtagccgtgctcaatgaggggccgcatgaagcggaaaaagaaggtgagcaggagcgtgcggatgtgggagccgtccacgtcggcatcggccatgatgatgaccttgtggtagcgcagcttctccagatcgaagtcgtccccaatgcccgcgcccagggcggtgatgacgggggtgagcttgtcgttgccgtagaccttgtcggcccgggccttctccacgttgagcatcttgccccacagggggaggatggcctggaagcgggagtcccggccctgggtggccgagccgccggcggagtcgccctcgacgatgtagagctcggtgagctccgggttgacctcgttgcagtcccgcagcttgtccggcatagcggctccgcccagggcggtcttgcggcggatggactcgcgggccttgcgggcggcctcccgggcccggttagccatgagggccttgtccagaatggcgcggcccaccgccgggttctcctccagatactcggagagcttgtcggtgacaatgttgttgaccagggtgcggatctcgctgttgcccagcttggccttggtctggccctcgaactgggcctcggtcagcttgacggagatgacgcaggcgatgccctcccggcagtcttcgccggataccttgtcatcgtccttgagaatcttcatcttcttgccgtaattattgagcaccgtggtcagggcccgcttgaagccctcctcgtgcatgccgccctccggggtgtggacgttgttggcgaaggagacgatgttctcgctgtacccgtcgttgtactggaaggccacctccgccatggcgtcgtccttctgtcccgccatgtagaccacatcggggtggaccgggtccttggactggttgaggaaggacacaaactcccggatgccgccggcgtagtgcatggtgtcctcctgctcccgaccggggcgctcatcaatggtatgaattttcagtccggcgttgaggaaggcctcctcccgcatgcgggtgtggagggtgtcgtagctgtactcggtgatctcaaacatctcggggtcgggcttgaacaccacctcggtgccgtggcggccggtgtcccccaccacctgcatgggctgggtcaccttgccccgggagaacttcatctcgtagaccttgccctccttgtgaacccgcacttccagccactcggacagggcgttgaccacgctggcgcccacgccgtggaggccgccggacaccttatagccgccgccgccgaatttgccgccggcgtggaggatcgtgaacaccacctccagggcgggcaggccggtctggggctggatatccacgggaatgccccggccgttgtcgatgacggtgatgatgtccccctctccgatcttgacggtaatctcgtcgcagtagccggccagggcctcgtcgatggagttgtccacgatctcgtacaccaggtggtgcaggccgctctccgacgtggagccgatatacatgccggggcgcttgcggacggcctccaggccctccagcacctggatctcagagccgccgtactcgtgctccacctgggtagtgctgttctcgaattcttcagacatttgaaaacctccattgggatatccgggcggccaggggccgcccctgcggccccgccgcaggagccgcctccggcggcccgtttggattgtttattcgaagctgttgttctccgcccgccggagcagcgtggcggtggacaactgggagagatagacggtggcctccccgcccgccgggcggcagaggacaaacgacttgggcagatcctcggccacattgactacctgcccggcctgctcggcccgctccaggaacctgcgggtcaggtgggaggcgctggtgttgtccagatcaaagagggcgagcacgtcccggtagggtaccacaacgccctggcccagatgcagatacattcagcgagcccccttatccttcaccacccgcgggccccacagccgtttccacagccgccagcccgccagcaggcccagcagggcaaacagcgccggcaatcccggcacaaagagcagttgggtcagcggagactggtcggactcccaaactccggcccgccccacagccaccgcagccgtcagcgcgacgaccgccgccgggggaagcagcttccaccaacgccgccgggtcagccggcacaccagatattctgcaatcagccccgccagaaagggcagcgcacaaaagataccgataataatgggcatatgcttctccttggatgcgtccatgtgtggaatgaaggattgcacgggccgccgttatcccgccctatatgggcagggggtacggacaccttcccctatggcttcagcgccccgccgtgaatgtggaagaccttcccctcctccagaccctccagccgggcgtcctcacagcaggtgatgaacacctgcccgccgttgatgcgccggagcacgaactcctgccgccgggcgtccagctcgctgagcacatcgtccagcaacagcaccggccactcgccggtctcctgataaaagatctcccgggaggccagcttgagggatagcgccgcggtgcgggtctgcccctgggaggcgaaggtcttggcgctcatgccgttcagctccacggtgagatcgtccttgtgggggccggagaggcactggcgggactccagctccgccttccggtggctctcctgatgggccagaagctgggggaggatgctccgggggctgtcctccgggtcggtgacggtagataccgtctcataggtcaggcccagctcctcccgcccgccggaaaagtccagatggatggggggcgtcacctcccgcaggcgcttgacgaagtgggcccggtagtggatcagcagggccccggtctgggccatgcgcaggttgaactcgtccagggtgtccagcagggaggggtgctcctcccagtcccggagtatgcggaccttatgctcgtagaggcggcgatactccgccagggcctcggcgtacttgggccgaagctggcagatacacccgtccaggaagcgccgccgggtagccgctccctcccggatgaggtagaggtcctccgggcagaagagcacggtgttgagcacgccggacagctccccggcggacttgaggcgcaccccgttggaatagagctgccgccgcaccccccggcccagacgggcctccagggtgaagtcccgtccacgggcggatacctccgccttcacaaaagcatggtccacgccgaactggatgagctcccggtcgtaccgggcccggtgggaggaggcggtggacagataggccaccgcctccagcagattggtctttccctgggcgttctcgccgtagatgacgttgacctccggggaaaaacgggcgtcaaggtggacgtagttgcgaaaaaaatccagggcaatggagtggacaatcataccactttcagtgtcacgccgtccagcgaaacggtgtcgccggggcggattttccggccccgcatggtgcagatctcgccgttgaccagcacctcgccgtcctgtatgcgctccttggcctccccgccggtgcccgccagcccttcaaacttgagcagggcgtccagcttgatgaattccgtggtgattttgacttgccgttgttccatagtctgttcctctctcagtcaggggtaatgagggcctccagcagccggtagacctccggcagggactttttcagcgccaccggccggcccttggcccggtcatagaaaaagtggccggaggtgccctccgccttcagctccccggtggacgcctcccgcatctcgtagcccagctccagcttggccggggacaggcggcggatgaataccgtgatggccagctcctcgccgaagcgggtcatggcccggtatttgcatgaaatgtccgtcagggcgaagtcgatgcccgcctccaccgccctggcgtaggggaagccgagctgatccataaaatcggtgcgggcctcctccatccagcggacgtaattgccgtgccagatgatgctcatgccgtcggtctcgtagaactggggccggtgaaggtagggcttgatctccatgctcactcgcccgccttcagccgcacgggcagcaccatgtagaggaagttctcctccccctcggtgggcaggatgacgcagggggacacgccggtggtcagctccagccgcactttgtccgccggggcggccttgagggcgtccatcaggtacttgttgttgaagccgatctccagcccgctgccgtcgccgctgagggggcactcgtcataggcgtcgccaatggcggttttggtggagattttcagcagattgctgtcaaatacgcagcgcaggggacttttcagcttgtcgctgatgatgagggacacgcggtcgatggaggagagcagggcgcgggtgtcaccctccacatgaatggtgttgttgcgggggatggcctggcggtaggccaggaattcgccctccagccggcgggacaccagcatggtgtcccccaccttgaacatcacgtggcgggcgccctgggtgacggaggccggctcgtccacgtcgctgcaaattttttccacttcggacagggccgcgccgggcactacgaaggagaaggtctccgctccctccttcttgtcgatggactcgtggcggagggccaggcgatagccgtccaccgacacgatggtgagaccgttgccgtccacttcaaacagggagccggtgtggatggggcggctctcgttgtcgctgacggcgaaaagggtctgactgatcatggcttttagcctggattgtggtagaatcagggaattttggtattctacggtgggcagctcggggaattcttccggatcggtgcccagaatgttgaattcgctcatgccgcatttgatgttgaccatatagttttctgattgaaaggtgacgatatcatcgggcagcttgcggacaatttcaccaaacaggcgtgcgcccagcaccagagtgccctcctcccggatgtcggcagggacaatggtgcggatgccagtctccaggttgtagccggtgaggcggaggtcgctgccggcctccagcagaatcccttccagagcgggaatggagcttttgggagatactgctctggatgtggtggagatggcggcctgtagcagagctttttcgcaggaaaatttcatgattggtgacctccattttgtagtgagtgtgcgtgaatccccggagaaaggggagaatgagatcgtaatagtaagccgtaggggaaaatgatgtggaaaaacggcggaatccgctgggggggaagggctcccgtttccacagggggtggggatgtttttgtcgcctttccaccgatgaggacgaagggatgggtttttccacacagggttgtccacatcttcacaaaataccgtggaaatgtggacagaacggtcaattattcgtagcgggcattgatgttggcgttgatgtccttgataacctcggcaatctccgggttggtcttggtcagcttctcgattcggtcaatggagtgcatgacggtggtgtggtcgcggccttcgaactccttgccgatctccttgagggagaggttggtcatgcggcggatctggtacatggcgatctgccgggccagggcggtgtccttggtgcggccctgcccccggagggcgtcggcgtcgatgttgtagaacttgctcacctcgtcgatgatgatgtccggcgagggcaggaagtcggccttgtccttgaacatgtcccgtaccgcccgggtgacggtgtccacgtccacgctctcccccatcagctcctggaaggcgaggattttgttgaccgtgccctcgatctgccgcacgttggaggtgatgttctccgcgatatactggagcaccgggtcgggcaggttcatgccgcgccggatggccttgtttttgatgatggccacccgggtctcgtagtcgggcggctggatgtccacgggcaggccccactcgaaccgggtgcgcagccggtcgtccagccgcagcatctccttgggcggccggtcggcggtgaacacgatctgtcggcctgcttcgtacagggtgttgaaggtgtggaacatctcctcctgggtggactcgcggccggcgatgaactgcacgtcgtccatgaggaatacgtccgccgagcggtacttctcccggaattcggggttgcgcccctcacggatggcctggatgagctcgttggtgaaggagtcgcctttgatatagacgatccggtaatccgggtggttctggtggatcttgtgggcgatcgcgtacagcaggtgggtcttgcccaggccggactcgccgtagataaacagggggttgtaggtctgggcgggccgctcggccaccgcctgggccgccgcgtgggcgaatttgttggacgcgcccaccacgaaccgctcaaaggtgtactcctcggtgcccggcagaaagacatcgtcggtttttttcttgccgaagtcctccagctcgccctctcccaggactaccacctcgaagtcggcggagaagagctcgtggagcgccttttggatcacgggcagatagcgggccatgatgatgtcccgcttgaagttggagggggtgtggagcacaaaccggttggcgtccagcgccacgggggtggcgtcgtcaaaccaggtgttgatcgtggtggcggtcatatccccctccatgagggagagcaccttgggccagatatcggccgggaaattcacggaaagaccacctctttcggaaaatatcaatagcgctttattataccaaaaaattgccttaaaagcaacgtatactactaaaaaaagaatctcttttttcaaagatttttccaccgggccgggatcggcgctgcttccccgttacctgcttgggactgggggctgcggccccggaaccccatggagccgggcggcggtacgttgtacgatggcggcaagacttgaaggcggttgcggcctgcatcggccggcgcgtgtcgatgctttgcctgacggcccccggcggattacccacccaatttggtggtatgtgcgctgtacttgcctgggcaacgccgccccggactgcggtgcgccggacttgccgcagtccctgttccccgctccgccggaaatgccgccgggctccgcccggcctattttttacctctatgacctcttagctcccctatgcgcctaccctccgcgcttctgcgcaggggcggccctcgtggccgcccggctggcgggaggtttgggcggggaggaaagaggcggacggggacaagccccgcccctacgggtgagtgttggccgaggcgggcccaatgggcacaagatgtagtacccggcgcggaagcaggcccaaaccgcaaaaaagattgcaaaaatggtgttgacaggctattttgagataggctataatatcatctgcatcgtgcaggcctgcacggtgtaaagcagtttactttgacgaccgcagccggaaggctgttgtggtaggcggccctgccgccggattacagtacaggaggtgtaccgacatggtccgtacctatcagcccaagaagcgccagcgctccaaggagcacgggttccgtaagcgtatgcgtaccgccaacggccgcaaggtcctggctcgccgccgcgcgaagggccgcgcccgtctgacccactaatgggtccgcgaatggaatagggctttcagaaggggcgggggagttttcccaccgcccctgcgcagcatacggagaaatcgaggaggcggcaggcgtggagcacaccgtttcgctgaaactcaatcacgtgttccgccgcctgtacggaaggggaaagagcgcggtgaatccgtgcctggccgtctactgccggaagaacaacctgggctacagccgcctgggcctgacggtgggggtcaagctgggcaaggccgtggtgcgtaaccgcacccgccgccgaatcaaagaggcctaccgcatccatgagggggcctttctccccggctacgacatcgtggtggtggcccgggtgcgggccgcccacagccgttaccgggagttggagcgctcgctcctgtctctggcggacaagctcggcctgctccggaaggagggggcctgattgaagcgcctgcttctggccctgatccggggctaccgcacgtacatctctccctcccgtcccccctgctgccggtttatccccacctgctcggcctatgccctggaggcggtggagaaatacggggcgtggaaggggggccttctcgccctgcgccgtatcctcaaatgtcagcccttccacaagcaggtttccattgagtacgatccggtcccgtaaggggctcaaactgaacttggaggcgcgcaaatggattttgcacagattatcctctccccttttgtgtggctgctgaccttcttttacaattttttcggcagttacggcatcgcattgatcttattcgcggtcgttgtcaagcttatcctgttcccgtttgcgctgaagggcaagcggagcatgattcagatgaacatgcttcagggcaagatgcagaagctgcagaagcagtacggcagagaccgtgagcgctataatctggaggtccagaagctttatgagcgggagaaggtcaacccaatgggcggctgcctgtggtcttttctccctctgctgattctgattcccctgtacgccatcatccgccagcccatcaagtatatgatgggcatcaacgatgtggagatactcaaccagattgcccaggtggtggactggaactccattgcggtgagcaacggctggatcaaggaggccggcgaagctttctccaatgtgggctataaccagctttacctgtcctccctgattaccccggaaaacctggaggcggtcaaggccgctgtgggcgaggtgggcagccggattttcgccgtcaactttgatttcctgggcctggtggatctggcccgtattccaactctgaaattctggaccgtggcgggcggcttcgccctgttcctgctgcccgtggtgtccgccggctccagcctggtgttctccttcatctccatgaagaccaacgccgtcaaccagcaggccgcccaggcggggaacaacgccagcatgaagtccatgatgatcatttcccccctgatttccctgtggatcggcttctccatgcccgccgccctgtgcctgtactggattgcccagaacctgctgagcatggtgcaggagttcatctgcggcaagctgctcaaaaaggactacgagaaggccgccgccgcccgggccgagcaggagcgcctggagaaggaggaggagaaggaggagcgccgccgcaaggccgaggagcgcgcccgccggatcgaggaggccaagctcaacaagggcaagaaaaagaagaccgagaagaagcacgacgaggacgaggacaagatccccggctccgtcaaggagcacagccgcgtgggcctgcgccagtatgcccgcggacgggcctacgacccctaccgctacagcgaggagggtcccaccgcctacccaggagaggcccccatcttcccgcccagatctgactcccgcgcgctgaagcgggaggcccatgagatcgaggaggagctgcgggagatccacaccgacgaggccattgaggacgccattctggaggaaaaggccctggaggcccctgtccaggaggagacggaggttgtctccgccggggaggagtccgaggccctctacgccgaggagtccgaggctgaggacgacaccgacaagacaaaggaataacggccctgccgtggattcataaggagagatgcccattatgctgaaatggatcgagagcaccggcaagagcgaggaggccgccatcgaggccgccctgcagaagctgggcatggaccgggatgaggtctccgtggagattctggagcgggccaagtccggatttttaggcatcgggagctgcccggccaaggtcaaggtgagctatgaggcccccgacgagccggaggagcgccccgctccggcggaaattacccatgccgaggcggagccagtcaaggcggcggagcccgccgtccgggaggaggccccctcccccgccgcccccgtggccgagggggagaaggcggagcgcatcgacgcctttctcaccggcctgctggcccagatgggggccgaggccagacccgtcatccggatggatgaaaacggaacctatcaggtggagctggtgggccgggagctgggcggcctgatcggccgccggggcgagaccctggacgccatccagcagctcaccggctacgccgtcaaccacggccagtccaagcgggtccgtattcatgtggacgccgagggctaccgggccaagcgggaggagtccttggtccgcctggcccagaaggtggccggtaaggtggtcaaatatcgccgcaacgtcaccctggagcccatgaacgcctatgagcgccatgtgatccacaccgccctccaggagaccccggacatcaccacctactccatcggcactgagcccaaccgccgcacggtggtggcgtacagccggggcgagcaccgctgactcagagagagcggcgctttgcggagacagttatgacaaatggaaagggcgcccgtcggggcgccctttttccacaagcgaggaagtatgtgtgaataaaacggaactgctgaataagctggcccgggacaacggggagcggctgctcctggcccgggcgctggacaagctggagctggcccggcagcggaacataccggcctgcaccggctttttatccccacaggagcgggcgagtgtggaaaacctgctcaatacctgcggccatccccgccacctcttcttcggcgggtacgagggagcggagcgcaccgtatgcgccttcctgcccgactggcaggaggcggaggactggcagggggacggggagagctgtcccgtccgcgccctgcggtgcacctggagcggcggccaaaagcttacccaccgggatttcctcggctccatccttggcctgggcctggaccgggagaaggtgggcgatctgctggtgggcgacgggcgctgcgacgtgctggcgctggaggaggtcgccgactttctggtgttccacatggagcaggcggggcgtgtaaaactcaagtgttcccttctgcccctggaccggctggagcccccggcggtggagaccagaaccattcgggacaccgtcagctccctgcggctggacgcggtggccgcctccggcttctccctgtcccggggcaaggccgccgacctgatcgcctccggccgggtgcagctcaaccaccgggaatgtgtcaagcccgaccacgccgtggcccagggggacgtgctgagctgccgggggctgggcaagtgcgtgctcacagaggtgggcggcccgtccaaaaaggggcgtattctcatcgtattggagcggtatgtataatggaacaggcaaaaatcgaccggatcaatgccctggccaaaaaggccaaaagccccgagggcctcaccccggaggagacggcggagcgggaccggctgcggcgggagtatatcgccgcctaccgggccagcctggtgagccagttggaaaacacctatatcgtggagcccgacggcaccaagcataagctggggaaaaagccgtgaaaaaaggccgcccctcccaacggaggggcggcctttccggcacatcggaggtcaaaaaacacgtaccgcaatccacgtgcccagggcgagctgcaccagcagcagggcgggcaggccgtacctgaaataccagtggcgggtcttgtgccgaaaggtccacatgcccaggagggcgcccggcgtgccgcccagcagggctacgcagaagaaggccctctcgggcacccgccagcggttgtgcctggccttccacttgtccacacccatgagggcaaagtccaggaggctggcgcacagcacccagaacagaaaatacttcatgccgggtcccccagggcggccacaaagccgccccgccgcttggtggtctcataccagagcctcagatcgatgcgcagtgcgctgccgctgtccagaatgactgccgtggtgtcatccagggcggtgatggtgacccagtgccagtaatccagctccttcaccctgccgttgtggaggttgaggaaggccacagggcagtcccgctccagggcgcggcggacaaaggcttcggcctgctcatagggcgggcgcttggtgcgggcggaggggaatacgaacaggccgggggtcagggtgaggccccgggcggcggcaaaggaggccatgccctccgccatctgctccggccggttgagaccgtgggaaacaggggtcacgtgctcccacacccggcacatcaggccggtgaaggaggcgcggtccatggccccctccgggtagaggggggccagctccggccgggtccgggccagataggagaggatgacggcggcggcggtggggccgcagcccgcccgctgctgccacagatcgggaaaccagtcctgatccgccccgtgggtcacggccccgtcagggccggtgatatccatccacgcgggatgggcgatggaaacatgcgcgctcaaggtcacatctgcctttctatgtgggttgactgtgcccagtataacacccgccgcccggcccgtcaaaggttgtctttcccccgggagcgtgctatactgtccgggtacgaaacaaaaaggagtgtaccgccatgtcccagctctctctcaccgagggaaatgtcaggcgggcgttaagccgctttgccatcccattcctcggtgcttccctgctgcaatttctgtacggcgcggtggacctgatcgtggtgggacagtttgccgaccaggcgggcatcgctgccgtgtccaccggcagccaggtcatgcaggcggtgaccaattttattatcggcctgtctaccggcggtacggtgctggtggggcagtacctgggcgcccggcggggggaggacgtaaaccgggccatcggcaccctgttttccctctttgccctcatcgccgtggtcctggcggccgccttcgccctgtccaccaacaccatcgtggcgctgatgcaggtgcccgccgcggcggtggcgcccgcccggcagtacctgtttatctgcgcctgcggcctggtgttcatcaccggctacaatatggtcagcggcgtgctccggggcctgggggactccaagcggcccatgtacttcgtgctggtggcctgcatcatcaacatcgtgggggatcttctgctggtgggagtgttcggcctgggggcggcgggggccgccctcgccactgtagctgcccagggggtgagcctggccctggccctggcggtactccgccgccgggacttcccctttgattttaagcggcgttcctttcggattcagggggacaaggcggcctgcatcctccgcctgggcctgcctgtggcggtgcagaatgtgctggttaccctctcttttcttatcatcaccgccattgtaaaccacatggatgttctggcccaatccgccgctgtgggcctggtagagcgcatcaccggctttatcatgctcttccccatcgctttccagtcggctatttccgccatgaccgcccagaatatgggtgcgggccgccccgaccgggcccggcaggggctgaaatacggtatcctgttttgtctggcggccgacatcgccatgtttgtcctggttcagcttgtcccggggctggccatgcggctgttcacccccgatgccgaggtgatctaccacggggtgctctacctgcgcacctacagcatcgactgtattctggtcacctttgtgttcaccctcaacggtttttacagcggctgcggccgcaccggcttcaccctgttcaacagtttggcatccaccttcctggtacgggtaccggcggtatttttcatcagcctgctccccggtgtcactctgctgcacatcggtgtggctgcgccggcggcctccgccgtccaggtgctcctccagctcctctacttccgcaccggccggtggaaccactcggttctgggggaggcgcagacatgaccgccgaagtgctggccttcctgggaggcgctccgggccccatttccctctttgaggcatgggaggaggccgtcctggcctgcggggagagcaccatgaaggtgtccaaaacccagatttcctggggaaacccccttcagtttgtcgttctctcccagccccggcgggccgcccagcggcggaccggggctctgctggccaccctggggctgggccgccgggtggagcacccccgcatcctccaggccgtggagccctatcccggccgctggacccaccatctgctcctgaccgcaccggaggatgtggacgggctgctggcggcctggctggccgaggcctaccgctttgccagggaaaaacagaggcgcgcctgatctcaggcgcgcctctgtttggatgtgtcagggacgcagaccgctgccgccctgcatggtgatggtctcaccggagatatacttggcatcctctgagcacaggaacacagcggtgcggccgatgtccttctccgggtcgccgaagcgaccggcggggatgcccttgatggtctgctcgtataccgccggatactcctcccgccacttcttgagggcgtcggtcatcaccagggggcaaatgaggttgcagttgatgccgtcggggccccactcggtggcggccacacgggtcatgccccggatgccctccttggctgcggcgtaggaggactggccgggcttgccgaacaggcccgcgccggaggcgaagttgaccacggagcccttcgtctccttcaggtgggggtagcagtgcttcatatagaagaaggcggcgtacaggccggagtagatggcctggtcaaactgctccttggtgtgctcggccagagggacgccggaggccgagttctgggcgttgttgatcaaaaagtcgatgcggcccaaggtgtccgccgcctgcttcaccacggccgccacctgctcctccacgccgccatcggcctggcaggccagcaccttcacgccgtagagccgctccagctcctccttggcgtcgtccagcttcttggtgttccggccggtgatcaccagattgcagccctccttggcgaaggcggtggacaggccgtagccgatgccgccgcccttgccgccgccggtgataatcgctactctgccgtcaaacttacccatatcgtctcctccttgaactttttagttttattttgatactatttgtatcatactcctttcgacggcggattgcaagagaaaactacctgtatacggcggttttagggaacatatgtttgcattttaacccaggctatgctatactggcttgggagtataccaataaggagggtctgccatgaaaacgctctcgcccaagcaacagcagatctatgactatatcgtttccttctccggcctccacggctatcccccctcggtgcgggagatcggggagtatgtggggctcaagtccccctccactgtccacttccacctgaaggggctggaggcggcggggctgatcaccaaggccgagggaaagacccgtgccattaccatcagcggcccacacccgggcgcgccggagccggcgggagaggagcccgaccaggtgcctgtggtgggcagtgtggccgccggagcccccattctggcccaggagtgcattgaggactatctgacctttgacaccggaggactgacaggggagcacttcgccctgcgggtacggggggagtccatgaggtacgcgggcatcctccccggcgacctggtggtggtacaccagcagcaggacgcccgcagcggggagatcgtggtggccctctttgaagatgaggccacggtcaagaccctgcgccgcagggacggacacacctggcttatgccggaaaacccggactatgagcccattgacggcgacggctgtaccattctgggcaaggtggtggccgtggtgcggaggtactgaggttgagtcctgtgccgaagcccagttggatgaaacaatgaataagggattatactgctcatgtccgcccgcaggcggaagaaaggagcctgaccgatgggaaagaacgaccgctttcagatcatctatacccaggggatcacggatatcacccgtatcctgctggacacccggacgggggtgctctacctccagacggtgagcggctatgccggcggcctcactccccttctggacagcgagggcaggcccatgaaatggctgccggaggagggagaggcatgagactggttacctggaacgtcaacggcctgcgtgcatgcctgggcaagggttttctggacttcttccagcgggtggacgccgacgtggtctgcctccaggagaccaagctccagcccgaccagatcgcactggagctgcccggctaccggctcttctggaacagcgcggaaaagaagggctactcgggcacggcggtgttcacccgggtggagcccctgtccgtcacctgcggcatcggcctggacgcgcacgaccacgagggccgggtcatcaccgcggagttcgacggcttcttcctggtctgctgctacacccccaacgcccagaacgagctggcccgcatcgactaccggatgcagtgggaggacgacttccgggcctacctcatggagctggacaaaaagaagccggtggtgctgtgcggcgatctcaacgtggcccatgaggagatcgacctgaagaaccccaagagcaaccggggcaacgcgggcttctccgaccaggagcggggcaagatgaccgagctgctctccagcggctttaccgacaccttccgcgccctctaccccgaccggacgggggcgtatacctggtggagctaccgcttcaacgcccggaagaacaacgcggggtggcgcatcgactactttatcgtgtccgaccgcctgcttccccgggtgagggacaacatcatccacgcggaggtggagggcagcgaccactgccccgtggagctggtgctggactgatcatccaaaacggagcccccgccggcgtgtgccggcgggggccttttctcttgccgcccgtcactccttcagccccagcagcacctgccccgccgcccgggcaaagagccgcgccccggccagggcctcctgaagggtgttgccgtgggtgcccacctccaccagcagagaaccgttggagagctgctggttgtaccgggaggagcgcatggtcatgggccgggccagggtgggatagagggtgttcatgctctcctggatgcggcaggccagggacaggttctgcatccagttggggtgttctcccccctcgctggagcccagcaccagcatgacctgggcggtgtccaccccgtcgatccgggtgacggccttgtataccgtgccgtcctcccccaccagggcgtcccggtggacgtccagcacgattttgatggagggatattgctccaggtaccgctgtaccgcctcggcggagcggtcataggccccgttgtacttggggtagtcgtatagggtgcggtcgtgtaccacggtgaggcccagctcggtgaacacccgctccatctcgtcccccacccgaaccacgttgtagttttcgtccagagtgcgggtgttgttgtccgagggctcgtaaatgtcggtgccgtcgggcgtgtaggcctcgctgccgtgggtgtggacgatgagaatctggggcccctccgccgggagggcaatgtttacgggggctgccgcggcggcggccagatccacgtccagcccggtgcggttgtagaggtacaggctcccggacacctcatagccctgggtgctggtgggcaccagggtgcgggcgatgatgtcctccggcgcggcagtggtctcgggaggcggctcgctgatgtcgtcgtgatcctgggcgggctgcccggcgggcagatcgggggtggcgggcgcggagccgtccagatggccggccacggcgtccccattcccccgcagcagaggagactggtccaccaccaggcgggcccagccgctcagaccggacaggggaccgtcgtcctccgctacttgtcccagttctgcggagagggcggcggagacaaagccggggtcctgtcccagactgcggaaggcattggcggcggagcctccgccgctgcacaccagcagggcccataccgccagggtggccagaaagagggcgagactgcggcggagcaggcggccccattggattctcggcttcatagttcatcatcctttgtaagtaagatgtccccctcgggggcggatatggatctctatgcgccccacagggggaatatgccagagggcctgtcttgactttttcagtcaattcgatataatgcttttacgatcgaatgcagagggggcggtccgggtggagagccgcggagaggtgctcaaccagtttctggtggaggtgtttggccagatcctgaaggcggaggccgcctgcctggccgggaaagacctctccctgcgggagctgcacctgatcgacgccgtgtgccgggcggtggaccagggcggggacaaccgctccaccgccattgccgccgccctggggatcacagcgggcaccctgacctccgcagtaaacctgctggagaaaaaggggtacctgctccgccgccgggatgaacgcgacaagcgggtggtacacctgctgccgaccgagcggggccgggccgccgacgcgcgccaccgggactttcaccggcagatggtggcccatgtcctggacggactgaccgacgaggaggcggagtgcaccctccgcgccctgggccgggtggccgagttcttccggcgcggcgcaccggagcggggatgaacaagacccacatcgcaacgatgggagagaggttctttatgagcaaaatagccattgccacagacagcaacagcggcataacccaggcccagggccgggagctgggtatctttgtgatgcccatgcccttttacatcaacgacgagctctttctggaggacatcaccctgagtcaggagcagttttaccagcgtctggaggagggggccgacgttaagaccacccagcccgcccccggcgacgtgctggagctgtgggaccggattctgaaggactatgacgagctggtttacatccccatgtccagcggcctgagcagctcctgcgagacggcggtgatgctggcccaggactacggcggaagggtacaggtggtcaacaaccagcgcatctccgtcaccctgcggcagtctgcgctggacgcccaggccctggccgccgcgggccggagcgccgcggagatcaaggcgctgctggaacagaccaagtttgactcggacatctatattaccgtggacaccctcaagtatctgaaaaaggggggccgctgcaccccggctgccgccgccatcggtacggtgctcaacctcaaaccggtgctgcgcatcaagggcgagaagctggactcctttgccaaggcccgaggctggaaggccgccaagaagaccatgctggacaccgcccgcagggtgatggagaccgacttcgccggctgccgcgggccggaggatcttcacatcgccgccgccttcaccggaacgcgggagggggcccaggagtggctggaggagctggaggcggcctttcccggctaccccatccacatggaccccctctccctctccgtggcctgccacatcggccccggcgcccgggcggtcaccctgaccaaggccctccccgtctgactccgtccaccagagccgccggccatgccggcggctttttgcattgaatttaaaaaacatgcaaattttcttcacgctttatacataatttgcggttatcctatgtagcgttgaaagaaatgaacccgtcaaaggagtgaccagttatgtataacagtgactataacagaccccctgaggagcgggagcccatagagaccaagcattttcacgtctgggacgctgagtcccccaagccccccaggaaaaagagcggggcggccaggtttgtggccctgggcctttgctgtgccctagtgggcggcctggtcggcggcggcggcgtactggccgccagccatctgagcggaggaaagaccaccatctaccagggtacctcccccaacagcatcgtatccctggcccatgtggacggacagaccgtcctctcacccgagcagatctacgccgccaacctgggcgcgacggtgggcgtcaacggcaatgtggataccaatgtgttcggctatacggtgaagaacgccgtatccggctccggcttcgtcatcggcagcaacggcagctccagctacatcctcaccaattatcacgtcatcgacggcgtcagcgacatcaaggtgtttttctccgacggcaagagctatgacgccaccctggtgggcggtgaaaaggagaacgacatcgctgtgctgaaaatcgacgtgggcaacctccagacggtcaccctgggcgattccgatcagctcaacgtgggcgaggacgtgtacgccatcggcaaccccctgggcgagctgacctttaccttcaccgggggctatgtctccgccaaggaccgctccgtcaccatgagcgatggaacggtaatgaacatgctccagaccgacaccgccatcaactccggcaactccggcggccccctgttcaacgagtacggccaggtgatcggcatcgtctccgccaagctgtccagcagctccaactccgaggcttcggtggagggcctgggctttgccatcccgatcaacgacgtgaaggatatggttacctccatcattgagcacggctacgtcaccggcaaacccaacgtgggcattctgatgaaggacgtgccccaggaggcccagcagtacggcgttcccgccggctcggaggtgctggctgtcctggacggctccggcgccggcaaggccggcctccaggcgggcgatattatcaccgctgtcaacggcactgcagtgtcgggcagcgaggccctcaaagccgccgtccaggactgtaaggcgggcgataaggtgaccttctccgtttaccgggacggggacacagtggagcttgagatcaccctggatgaggataaccagaccacccaggaggctatggagcagctccagaaggattatcaggagcagcaggcccagcaggaacagcagcagccccagcagaatggcggctattttccctggccctttggctggtaagacgtcagaatttagataaatggatgatagaagcagcggcgcacggatatccgtgcgccgctgcgattgcatataatgcctccggccaaaggcgccggagggagggaaagtgtgaaagggaaccgtcagggttccctttcgcgtaaaatagaatgactttttgagacatcaaaaagtccggcagcctgtcggaaaagtccggccggacttttttgacaggctacagcggcgcacggatacccgtgcgccgctgctttttaggtgactccccggtactttttgcgggttgcgataccgccccggatatgccgttccgctttattttcgtccagcacctgcttgacctggaggtaaagaggcttgttaaaggcgggcagacgctcgcttaggtccttgtggaccgtggatttgctgatgccgaacctctgggccgcgctgcgcaccgtcgctttgttctctatgatgtaaagcgccagctggcaggcgcgctcctcgatgttccctttcaaacagcaacactccccgcaatgattctcacggggcatgtatatgcgtcggagcggggagatatgttgcgcacagttacgtctgcatgtttccggaaggtctggcgcagggcatgcaactggtgcgttcgacgatatggtagggcaagctaattttaacgggcagttggtgaccgccattgattcggtcggctagggtacggactgccatcttgcccatttcatccaaagggacgtgtatgctgcttattttgggctggacatagcggacgtttggaatgtcgttaattccaataatggaaatttcgtcaggaacctgaacgcccaactccttgcaggcccgaagcgcgccgatagcggtcatatcattggcgcagatgacggctgtaatgttgcggttctggctgagaagctgcttcataccctgaagaccgccgtccatggagagcgtattgatttgaaccagatgctccggacaagggggcaggccgcataggcggagcccttctaaatagccgcggtagcgtccctcctgctctgctccaataaaagcgatattccgatgattccggtcataaaaatagcgtacggtatcccgaacggcaaaaaaacaatcacagagtacctggtcacattcagcctccagattattgaggccaacatagacaatattgcggaatcgttttttcatggaggtgaggagcgagggctgaaaccgtcccacaatgatcaggttatctgagtcgcagcccccggactggcgtgctgccgccggagtttgaaattccagcatggaataggtgtatttcagtacaaagttgctttgaaatgcttcctgctcaatactggagataatgcgggggaaaaaggggtcatcccgtacctccccgggggaacaggcaattaatccgtagatagactgcataaccggggtgggctgtaaagcatgccggagctcgcgtgcgactggattggggacatacccggtttttcgaacaatgttccagatgcgctcctgtacctgagcgctggccgctttggtgtttggctggtttaaaacacgggagacagtggagatggaaacgcccgcttctttcgcaatttctttgagtgtcatgatacgcctccctgtttgaataatttgttattattttaacacaaattttgagtaaaacaagagatacacttaagaaattttatgaactctcgtgccaagtggcaagatatttgtaaaattttttacattatgtgcaatatgtaaaaggtatactactccatattgtattaaatcaataaaattagcacaaaaaacaatcgattgcttaaaaacgggtgccaaagtttgagtaatattgttgaagttaatgatatagtgtgttaatatcttggtgcaatttagtaatattatatagtcataaaaagtattaggaataaacttaacttttcttaaagcaaatttgcgtaaattagaagaggtgattttgtgaaactggaatttgagtatgggcagggcctgctgggcgcggagctgcccgacagcacggacatcttcatccccggggagacggtagcggatccgccctgtctgccccaggactgggacagcctgtacgccgctaccctggcgtccatccgcaaccccatcggcatgcccccgctgaaggagctggccgggccgggcaagtcggtggtcatcgtcatcccggacatcgtcaaggggggcaaccagcccaccagccaccggaaggtggccatccgtgcctgcctggacgagctgtacgccgccggggtggagcagaaggacgtgctgctgctgttctccaacggcctgcacccccgggccaccgtggccgagatgcagaccatcctgggccccgagctgttcggcgagttctaccccaccggccagatcaccagccacgacagcgaggactacgaccacctggtggaccttggctacaccgcccagggggaccacgtgatcatgaacaagtacgtctacgacgcggacgtggcggtgctcatcgggcacacccagggcaacccctacggcggctactccggcggctacaagcactgtgccaccggcatctcccactggcggagcatctccgcccaccacgtgccccaggtgatgcaccggcaggacttcgtgcccgtgtccacgaacagcgagatgcggcacaagttcgaccagcagggcatgcacatggaggagaagatgggcaagaaattcttctgctgcgacgccgtgctggacaccaagagccgccagatcgagattcactccggctgggccagggagatgcagcccgtgtcctggaagatggcggacaagcgcacctatgtccactgggcggagaagaagtacgacatcatcgtcttcggcatgcccaccaacttccactacggcaacggcatgggcaccaaccccatccagatgatgcaggccctgtccgcccaggtcatccgccacaggcgcatcatgagcgaccggtgcgtgttcatcgtctcctccatctgcgacggctacttccacgacgagcgctggccctacctgcgggagctgtacgacctgttccagcacgactacatgaacatcctccccgacatgaaccggtacggcgagtacttcgccaccaaggaggagtacatccgcaagtaccgcttcgccaacgccttccaccccttccacggcttctccatgatgagctgcggccatctggccgaggagcacaccagcgccatctacatcgtgggcgcccgggagccgggcatcgcccgcagtatgggcctcaagacccgcgccaccttcgaggaggccctggccgacgccatgcgcaagtacaccggccccaaccccaacatcctggccctgccccgcaccttcaccaccgccgccgtccacctgtgcatgaaggaccctgcgctcaactccgcccccgtgggcggctgcccctgcggcggctgagccgcaaggagtgaccgaggaaagaggggtgaggaaccaaacattgctcccggtctattgggttccaataattgaaagtccaatggtattaagtcaaggggataatacgagaaaattttgaggaaaagtaaagcaaaacggatgtttagagtgcaaaaaggcaacacccaataaagccctgcccctataatttttgaaacagggccttggcgtcagagaggcaggcgatatcgcttagccctccggcgggatatacaggcggttgtccttcagcagccgaaagaccaaccgaaccagttttctggcagttaaagcgagtgcgcgtttgtgctggtacttgttaacctctttgaatttgaggtcatagtagcgccggaactcggagtcgcatcttctcacagagttggcagcttccaggaggtagtagcggagatagcggttgcctgatttaatcatccgggagtgttctgcttcaaattcaccggactggtgctgtgtccagacaaggccggcaaacttggcgacagaggcttgggaagcgaaacggtggatatcgccaatttcagcgataataccggcggagtaaaccttgccaacgcctggaatagaggtcagggtatttgggataatctcaaactgttgttcaatagctttgtccagaaccttgacctgttctttcagcgcccgcatggaggcgatagaaacggccatggcctggttcacggtgtcgttcactgttttaggcagacggtaagaacctctggccgcagcctgtacagccttagcggtggattctggatctgcaaatctgccacgccccgtttcagcaacaaaggcagtcaggtcatccagatcagcatttgccaggttgtctaccgtttcaaaccgctccatgagtgcaatggtggtggcgctggtattctgaatacccttgtcctgagccatgccggagcatttcagaaataagtagttggcaaaccgctgcttctcgcgggtcagattctgaatgacatcaaatcttgccctggtaagggttctaagtgcctggtagcgatagtcgtccatataaacctccttggcaatcctgccgaagcggagatggtcggcaatcacaaaggcgtccacccagtcgttttttggcaggtcaggataggcttccttgaactttttgacctgtttcggattgaggacatggattttccgccggaaccggcccagaccgccatcttcacgaagagcatagaccaaattgtccccgtagatggaggtagcttccaggccaatcaccacatcactgagccgcatagagctgagtgccgacacgattctctctgacaacagtttagcaccaccgaggttgttctgcacagagaagctggagtgtttgctgccgtccggcttcatcaggtaggctacattgttcttgctactcacatcaatgccaacgaatagtggattcacacttttcacctcccctcgtggagatttcaggccagcaggctttgagatacccatgataaccggagcatctggcaacctcgcatatcagaatcattccggagcagaccaatgcgatatccctcactgctgaaagggcggtcttgtcttcggcaaacagccaatgagtttgcagctaacttccggctcagggggacggactttcaatgaagcagccttgtggctcaacgaggagcaaaagaacttgaccctactgtcctacagctattgtatcacgggtatctctaagcctgttggttacacggagtgaactaagcagatacacttaaaaatcatctgcaaatcttattatacgaggagaatgattatgaaaaagctgttgtctcttgtactttcgtttgctcttgtctgcacactgatttccggatgtggcccgaaagggggaggaggaaactcgagcaaccagcctctggacgccgctgaaacgaccttcggcctgacgcccctgccggagcgcaccacactgaccatcggttttttctccggctctgcccactccatgccctggtatattgctgatagaatgggattttttaatgaattaaacatcgatgtggagtatgagtcctttatcggcggcccggccatgatggaggccagcgccagttgggacatctgtgatgtgggtgctcccggtattctgaacggcatgaagaactatgatatccagatgctgggcctgtgcgacaacgagtacaataccgccctgtttgtccgtccggacagccctcaggccgccgatcctaccaatcctgaagtatggaaagggattgagtgcattctgcccaccggtacgaccctgcagtacatgttcctcagctatcttcagtcactgggactttccgcggatgacgtgacaattaccaatatggatgttacgcccgcgctgaccgccttcaatgccggagagggcgacgcactgtgcgtttggaatgccgtggcatacaacgccgaggacagcggactcgtccgtattaccgatgtcagcgaattgggcatcaacaatgtctgcggcctggcggccacaaaggatgctatggagaataagagcgacctgatcgacctggcctggatggtctattatctgacttgggactggtgccagcagagcgaggacaatatggcgcaggcggtggaactctatgtggagtcctgcgaggacgagggtgtggtatccaatgaaagcatctgtcagcgggctttggatatctttgcctgccccagcccctctgaggccgtcagcgtgatgactacagaggaagaggatcgccttagcttggcggatcgtccggtgttggccgctgaaaacgatctactggagacaatggactttttcatctccatcggcagctatactgaggaagaccgtaccgccatccttgataaggagctggtgaactcctctgtggcggagcggtgcgccgagacgcttaaaacgctgggctatctggaataatcagctgcacatctgcgcaacccggggctgcattgtcgttccgcttaggcacgcagtgcagcctccttgcctgccaaacggcggggaaacttgttgtaagggggaagtaatatgcaaaatgcttccagcgcgggccggaagctgaccaacgaggagcgcgtcgaagtggtcaagcggcagaaaaagcgcaacagcttccaactggctatgctgtcggtcatcggcatattgggttttctacttctctggcaggcagctgttctggcgggtgttctgcccagccgctacgtcccggcgcctacggaggttatcgcactgtttgctacaaagctggtggatcccaatccggacggcgcggtgctgggggttcacatcatggccagcctccaggtggccctgacgggttttctgctggcaattgtcatcggaattcctctggggctttttatgggctggttccggggattcgacaaatttatgcggcccatctttgaaattctgcggcccataccgccggtttcctggattccgctgaccatcatctggatgggaatcggcctgcaggccaaggcatttattgtattcttttcagcctttgtaccctgtgttatcaatgcatataccggcattaagcagtccagcccggtgctgatcaatgtggccaaaacctgcggagccaccaattttacggtgttccgcaagattggaattccgtctgccatgaccatgacctttgctggcatccgcgtggccctaggaaacgcatgggccacgctggtggccgctgagatgctggcggccaatgccggacttgggtacatgatcctccagggccgacagtttgcccgggccgacatcattatcctgggtattgttgtcatcggcgtgatcggcgtcattttcacctcggtcctgggactgctggagaagaaagtgctgaggtggaaacgatgaaacagagcagtaccagtgttattgtcatgagcgacgcggagcgccgtgagagactccgcaaccggatttacgccgtgtttcctgtagtttccgtcctgcttctgatcctgctgtggtttttggccgcgggcgcggaaaacagcacctttccctctcctgtggatatttggaatcgattcctgctgctgatggaaaaaccgatcaagcagctcaacctctttggccacatttgggccagccttctgcgcgtatttattgccctggcctttgcctggctgcttgggatctctttcggcattctgatcggctggaacaagaaggccaacgcactactggggcccctctttaccgcctttcgctccgtgccgcccctggcctgggtgccgttgatgaccatgtggtttggcaccggtgaatttcccaaaattctgattgtatttatcggcgcgctgatgccggtggtggtcaacacgcaggcgggcatttccaatgtgcagaacatgtacctcaatgtgggtaccattttccacgccaacaagcggcagatgctctttgaaattgccattccgtcggctctggacgccatttttgccggcgtgcggacttccacatctgccggctggatggtggtgctggctgcggagatgctgggcggaaagtccggcattggtttcctcattacccgcggtatggactccggagactatgccctgtgtctgttgtccatggtgtgtatcggtttggtcggcgcgctgctggccatcattacccagctcttagaaaggatggtttgtccatggacggcaaaaaagtcaaactgagactggagcatatttctcagagctacattgtcaaaaatgaggtgtcagacgccgtggttgacgtgtctctggatgtgtacgacaatgagtttctggtcatactcggccccgggcgctgcggtaaaactgtactgctgaatatgatagccgggctggaaaagccggtggacgggagtctcttcctggatggagaggagatccatgggagcgacgagcgtattggcatggtgtttcagaagctggcgctgatgccgtggaaaaccgtaatggaaaacgtagagttcggcctcaagatgaagggtgtgcccaaggctcagcgccgggagacggcccagaagtacatcaacctggtgggcctgcagggctttgaaaaaagctatcccagccagctctccggcggcatgaagcagcgggcaggcattgcccgcgcctataccaacaatccggagattatgctgatggacgagcccttcggacaactggacgcccagacccgatattccatgcaggacgaggtgctgcgaatctgggaaagtgaaaagcgcacctttatcttcgtcaccaacaatatcgaggaggcgctctatttggccgaccgcattgtgttgctgaccaactaccctgcgcaggtcaaggaaatctatgacatcaacctgccccggcccagagatacggtcagccctgagttcctgcgcctgcggaaaattattagtgacaacacggatttggcgctctgacggaggtggttaaggatgagcgaaccaaagagtgaatacaaggtggaggttaagaacctcacaaaatattttggggatctgcacgtgctcaacgacatctcctttaatgtcagaaagggtgaatttatctgtattgtgggccctaccggctgcggtaagaccacgtttctcaacctgctgacccgcatttacatgccatccaagggcgaccttctgatcgacggagagtccgccgaccccaaaaagcacaatttggcctttgtgtttcaggagccgtcctctattccctggaagacggtggaggaaaacctgcgctttgggctggagctgaaaaagctgcccaaaaaagagatcgacgagcgggtggaaaacattattaagctgatgggcctgcaaaactttcgtgacgcctatccgcaccagctgtcggtgagtaccgagcagcgtattatcatcggccgggccttcgccatgaacccggatctgctgctgatggatgaaccctatgggcagatggacatcaaactccgcttctacctggaggacgaggtggttcgcctctggaaggagacgggcagcacggtgctgtttattacccacaacattgaggaggctgtttacctcgccgaacgcattctgatcctgaccaacaaacccactacaattaaagaggacttcaaggtagaccttccgcggccccgcgatgtgacttcgccggagtttaccaaaatccgccagtatgttaccgatcaaatcaaatggtggtaagggaggcttttcaaactaatgtatgacgttctgatcatcggctgcggagtaattgggtctgccatggcgtatacgctgtcacggtatcaactgaaggtctgtgtatgtgaacggttcaacgatgtggccaacggagtaaccaaggccaacagtgccattctgcacgccggctttgactgcccgcccggcagcctggaggcccgcatgaacctggagggcattgctatggcccgggaaatctgcaagaaactagatgtagagtaccgggatatcccctcgtttgtgatcgcctttgacgagcgggagatggagtatgtaagggagctctatgaccgcggcgtggccaatggcgtaccgggcgtgcgtattattgaccgggaggaggcgctccggctggagcctggcctcaatcccaagctgatcggcgccctgtatgcccctggctccggtattattaatccctgggagtacgccgttgccatggcggagacggcagtacgcaatggcgtggaggtgaagttgtcatcccgcgtaaccgggattgagcggaatgaggatcactttgtggtgacaaccagttccggaagctatgaagcccgctatgttatcaacgccggaggggccttttccgcccaggtttatgagctggtggggggccacgggctgaaacagacaaatttttgcggccagtattacgttctggacaaaagccaggggggcatcattaactccgtggtattcccctgtcccgacgagcacggcttcaagggaatcctggtggcccccacggttcatggaaacctgattgtgggtcccgacgcatatcaggtggaggatggcgaccatgtggccacggtcgaaccctatctgagtcaggtgaagagcggaggactgcgctctgttccgggcattgacttccgtcagacgattcatgagtacgccggagtgcgtcccaatacgcaaataccagactttgttattgaagagtcccccatttgtcctcatttcatcaacctggcgggtatcaagtcacccggactctccgcagctccggccattgccctggagggattgcgcatactgtccgggtgcggtcttgagctgacggaaaaggagacgtttatcgaccggcgcaggcgcattaagttccgggaactcagcaatgcggagaaggccgcggtgattgccgaagatccgctctacggtcgggttatctgccggtgtgaaaccgtgacggagggggagatcgttgaggcgattcaccgtcccattgtcccccgttccattgacgccatcaagcgccgctgcaacgcgggtatggggcgctgccagggcggattctgcggcccccgggtgcatgagattctggcccgtgagttgggtgtttccccaatggatataacaatggatgaggaggggacctggctgctcagctcccccatcaaggaggtgtccgtccatgacgcttaactatcaggtggtagtggtcggcggcggccctgccggactggccgcggcctgcagcgcgcgtgaggcgggagcggagcgggtgctggttctggaacgggacaaggaaccgggcggcattctgaatcagtgcattcacaacggctttggactgcactatttcaaagaggagctgactggccctgagtacgcgggacgttttattcagcgggcttctgagctgggagtagagatcctgctggatactatggtgctctctgtggaggagggtcacacggttcgtgcggtcaattgccgggacggactgctggagatccaggcggatgctgtcgtgctggccatgggctgccgggagcgtacccgtggggccatcgccattccgggagaccgtccggccggaatttttacagccggtaccgcccagcgatacattaacattgaaggctggatggtgggccgccgggtggttattctgggcagcggagacatcggcctgattatggcgcgccgcatgacgctggagggggccaacgtattggcctgtgtggaactgatgccctactccaatggattaaaccgaaacattgtgcaatgcctgaaggactatgggattcccctttacctctctcacactattacgaatatcgtcgggcgggagcgggtggagcaggttgtggtctccgaggtaggcgctgaccgcaggccaataccaggtacggaaatcacgtttgactgcgacaccgttctgctgagcgttgggctaattcctgaaaacgagctgacccgcgctgcaggaattcccattgacagccgaaccagcggtgccgtagtttttgaaaacatggaaacggcgactccaggaatttttagctgcgggaatgtcgtccatgtccatgatctggtcgactttgtcacggcggagagccggcgggccggtgcagcggcggctcggtatgcagcggctggtcagagctcccctgccctgtcctgcctggaggtgcagaatggtgcgggtgtcacttacacagtgccgcagaagatacggcccgcccatgtagagaagggcgtggatctctttttccgggttgataacgtgtaccggaaccgtcgtatctgcgtgacctctgcaggggaggagctatgcagcttctccagggagcacatggccccgggtgagatggagcacattctcctgcccaagcgtctgctggagcgggcaacagacggggaactgacggtttccctggcggcggaaaagggggcgaaggaatgacggagcttacctgtattgtgtgccccaagggctgtcgcctgaatgtggatgaggagaacgggtttctggttacggggtatggatgccccaggggaaaggaatatggacataaggagctgacagcgcccacccggacgttgaccagtattgttcggatagaaggggcaattcacccctgctgtccggtcaagacctcgggggagattccaaagagattgattatccaagccatgaatctgttaaaaaaagtccgcctcagcgctccggtggccgccggagcggtggtggttcaggatatctgcggaacgggtgtggactggattaccacaaaaaatatgtagacagtcaaggcgctcaacagcccagaggccccggaaccagacggttccggggcctctgttatgctgattgcagttcgcccgccggaggcgggggtcatgaaggacagcgttccagattacacgttaaaccggaacaggacgatatcgccgtccagccccgcggaatacattccgcgggggccccgaattgaaaaacagccggcggaagtgaattccgccggctggcagggttttgtggggcaaaacgcctgcgcggcgcaggagcgccgccccgcctgcggcgggggtcatgaaggacggcgctccagattacacgttaaaccggaacaggacgatatcgccgtccttcatgacgtactccttgccctcggagcgcactaggcctttctccttggccgcgttcatggagccgcaggccatcagatcgtcgaagttgaccacctcggcgcggatgaagccccgctcaaagtcggtgtggatcttgcccgcggcctggggggccttggtgccccgtttgatcgtccaggcgcggcactcgtcctcgccggaggtgaggaaggagatcaggcccagcagggcgtagctggccttgatgagccggtccaggccggactcggcgatccccagatcgtccaggaacatcttcttctcctcgccatccagctcggcgatctccgcctccagcttggcgcagacggggatgacctgggcgccctccttggcggccagctcctccactaccttgtagtaggcgttggcatggcagtcggcaaagccctcctcatccaggttggccgcgtagatgatgggcttgagggagagcagctcggcggcggcgatgatggcggcgtcctcctcgtcacagtcgaaggagcgggcggagttgccgtcgttgagccagtccttcagggcggagaacacctccacctcgcggagatacttcttgtcccccttggcggccttctgggccttgtcaatacggcgctccaccatctccacatcggccatgatcagctcgatgtcgatgacgctgatatccccggcggggtccactggcacgttggtgctggtgtcggccaccacgtgcatgatgttctcgtcgtcaaagcagcgcaccacgtggacgatggcgtcgcactcccggatgttggccagaaacttgttgcccaggccctggcccttggaggcgcccttgaccaggccggcaatgtccacaaattccaccacggcgggggtggtcttcttggggtggtacatctcggtcagcgcgtccagccggtggtcgggtacggccaccacgcccacgttggggtcgatggtgcagaaggggtagttggcgctctcagcgccggcgttggtaatggcgttgaacagggtgctcttgcccacgttgggaaggcccacaatgcctaatttcatcggtaaaaaccctctttcggtatgttcgtttccacattatatccgatcccggtggaaaaaacaagcgcgccgggccaattcaaacagccgcctgcgcagcggtggggtgttctggccgtccgggcatttttgcaggggaaaacggcgcgccccccttgcttttccgacaggaagcgtgtagaatcttaacgctcctttaacgatacgacaaaatatggagggatctcccatgggactgctgcgccagcccaccagtgatatcaccaagggcgtgatctggaaacaactcctcgcctttttcttccccctgtggttcggcacctttttccagcagctctacaatacggtggacaccctggtggtgggccggttcgtgggcaaggtggccctggccgccgtgggctccacctccgtcatcgttaacctgacggtgggcatcttcaccggcctggcggccggtgcggtggtagccatcgcccagcacttcggcgcccgccgctgggacgaggtgcacgagagcgtccacaccgccatgctgctgagcatcctcatcggcgcattttttatggtgacgggctttgtcctcaccccctgggccctgcgggccatgggcaccaccgaggatgccctgcccggggccatcctctatctgcgggtctatttcctgggtatggtgcccaacgtcatctacaacatgggtaccggcgtgctgcgggccatcggcgactttcggcggcccctctacttcctcatggccgcatccctgtgcaacattgtgctggatctgctgctggtggtagtgttccatatgggggtggccggcgtggccatcgccaccatctgttctcagcttctgtccgccgtgctggtggtgatctcactcatgcgctccgagatgaccccctatcagctctttcccaagcggctgcgcatctatgccatgcccatgcgcagcatcctgatgatcggtgtgcccaccgccctccagtcggtgatgtacaacgcctccaatatcgtcatccaggcctccatcaactcctttggcaccgacgctgtggccgcctggaccgcctacggcaagatggatatcattttctggatgaccattaccgccatggcccagtccatcaccacctttgccgggcagaactacggcgccggggagtatgagcgcctgaaaaagggtgtccgggtgtcggtggctatgacggcgtgcttcaccgtcctgctcagcactgcctttttcctgctggcccggcccctgctggccatcttctcccccgaccccgacgtactggaggtgggggtggagatggtgcgcttcctggccccctgctatatcacctatattctcatcgagctgctcactggagccatccggggggcgggcaagtcggtagcccccatgctcatctcggtcttcggggtgtgcggcctgcggctgctgtggctgttcaccgtcgtgcccgcccaccacaccctgctggctgtggaggccagctaccccatcacctgggcggtcacctccgtggccatcctgctctactaccgcttcggccggtggctccacccgcccaagaaggcgtaaaagcgccgcccccatattttgcggggggacgccgtcattgcagagccgtaggggcgggggcccacacccgcccgcggtcaatctgcggccggatcagcgggccgatgtgggcatcggcccctacgttgttcaggaggcggaacgatacccgcaggattgcaggggcgggtcctgtccccgccgcagggttggggcgggcggccacaagggccgcccctacatttggagggagcggtaccattgcagaaatgtagcggcgggtgtccacacccgcccgcggtcaatctgcggccggatcggcgggccgatgtgggcatcggcccctacgttgttcaggaggcggattgatacccgcaggactgtaggggcggggcttgtccccgcccgcgtctctcttgcccccgccgcagaagagaaagaggacgcgcacgccggaggtgtgcgcgtcctcttggtttagtcatggctcaggtagtagggcttcatcaggctgggctgctctgtggagtccttctgcccattggtgcgcaaggtgacctccgggggacggccccggccgccgtgacgtccgctgcccttgcgcttccgcgccgcctggggctccggcttcgcagggggttccgggggcctggcggccttcttccgctttttagcgggctgttcaactggtttgtcctttttcggtacggcctgggcccggccgcgaggggccagcaggcgggcggtggcgtccatgatcacgtcgctggccagggggtcgggcttgtggaagtcggcaaactccgcctggaccggccgggcgggggcagtggccgtcagggcctcctccagggtggcgctgttgcgctggccccgcttgcggcgctttttggcggaggtctccccggctggctccggctggggaggctgctccagtaccttctggttggccttggcctttcgggcctcggcggcggccttgttggccgcatcccgctggcggcggcgctccttggcggcggcccgggcctcggcgtcctctggattcactacccggcccttcttgtcgcggggcaggggctccagcacctccataggccaggggtggccctccaccacagggatggcgcggccgatgagcttctcgatggccttgagctcgtccttctcgttgatgtcgcagaaggagatggcggtgccgccccgcccggcccggccggtgcggccgatgcggtggacgtaggtctccggtacgtcgggcaggttgtagttgaacacgtgggagagctcctcaatgtccaggccccgggcggcgatgtcggtggccaccagaacctgcaccgcgccgctcttgaagtcggccagggcctgctgtcgggcggtctggctcttgttgccgtggatggcggcggcggagatacccgccttgaccagatccccggccaccttgttggccccgtgcttggtgcgggtaaacaccagggcgtttttcacgcccagttcccggatcagggcggcgagcagcctggtcttgttgccgcggtccacgtagtagagcttctggtcgatcacctccaccggggaggagatggggtctaccgccaccttgacggggttgtgcagcagggagtctaccagcccctgcacctcggggggcatggtggcggagaagaagagggtctgcttttgggcgggcagccagccaaggatgcggcgcacgtcgtggatgaagcccatgtccagcatccggtcggcctcgtccagcacgaagatctccagccgggacaggtcgatgagcttctggccgtagaggtcgcccaggcggccgggggtggccaccaggatgtccacgccctttttcagccgctccacctggggagcctgccccacgccgccgaagatgacggtggagcgcaggggcaggtacttgccataggcctcaaagctctcctggatctggagggccagctcccgggtgggggtgaggatcagggcccggatggggcggccctgggccttacggccgctgagctgctggagaatgggggcggcgaaggcgcaggtctttccggtgccggtctgggcgcagcccagcacgtcccggccggtcagcgcggggggaatggcttttgcctggatgggagagggctgctcgtagccctggtcggccagggcccgcaggatgggctcgttgaggccgagttcttgaaaggtcatgttgttcgtcctttacagcgttttggcccctcctgcgccggggggcggttgcgggtcataccccaccgcgcagaggtgggggaaaacgcggcaaagcccgccggaaaaccagcgggcatttcgcacgcgatattcgtactcctaaagtataccacaaatttggaaaaatacaagtgggcgcggctcagccctgggcctgggcggtgttgagccccagcaggccctggagcacggcggctaccgtctcctccagccctctcccctcccccacgtccacggtgaggtcagcgtaccgccggtagaggggttcccgggcggcgtacacgtcggccagggtctggcccggggccatggcgatgccccgggtggtgatgttgtgtatccgccgctccagctccggcagagggacgtggaggtagaccacccggcccagggccctcaggtggccgattgcccccgcccggcagacggcgctgcctccgggggcaatgacggcgcccgtgcaggccagggagcagatggccgactcctccgcgtccagaaagggctccacgccccggttgtccagcagctcctgtaggagggccccctcccgctgctgaatgaggaggtccacgtccacaaactgaaagcccagggccttggccagcaggacgcccacggtgctcttgcccgagccgggcatgccgatgagagtgatgttattcaatctgatttgctcctttttacacggttccgaccgcgccccagggcagctccagcggaatctgatggacggcagagggggtgctgctgtccggctccccctcgtacaaagccagcacggccccgccggaggcatcctcggggacaaagaagatcatctggccgtacagggggtcctcccactgggcgtcggagagggtgaccagatatacccccgcgtccttgagctgccgggccagggaggcgtcgtcctccgccagaagggcggtgccgtcctccagccgcagctcggcgggaaaaaaggtcaggtcgtcccggcgctcgcccccctccacccagagatccacggccaggcagcggaagccctcccgccgggccaggggtacgtaggtcagatccacctcccaggggtcctccacggtcacctgctgggtaccgtggatggaaaagggctcccaaagggcgtgagtcccgccggcgggctccgcctgggcaaccgcccccggctctgggcggcggcccgcaaaggcttcggacaggttaagcataagacccaacacgaagggcaggacaatgcagaggaggaacagcgacacgagcacgatcaccagaagcttgagcggggagcgctgcctccgtgcggggggcccctcccagggcgtccctccctgggggccgccgtaggacaccgtccgggggcccaccggtggggtcttgggctgggccgccgggcgcggccggtcctcggaagcggccgaaacgcgggcgggcggagcctgcgccgggcgggcccctgcgcggtccggcgggggattgtagctgccgcacttgggacagaagtcgtcgctgtcgtagtcgtagggccggccgcaactcgcacaggtcaccttccgcatgaaaacgcccccttctcggattttcctcagagttaattccattataacagaaagcaggcccggcggcaaccgtcctccggccatgaccaaggcttgatgccgcacttgacggccgacagtggtttcttataccataaagcggtacggaatggtataatggagccagactttgcaccatctgtaccggtcgcaggccggagaaacagccatgagaaagagaggacatccacccatgaccaaccgcttggaccgcgacttccacctgccggggctgctgcgctttgccctgcccaccattataatgatgctggtggtcagcctctataccatcgtggacggggtgctgatcgcccgcctggtgggggaaaatgccctagccgccgcaaatgtggcctatcccgccatcagcgtcaccctggccatggggatcatgctgggcaccggcggctccgccgtggtggcccacaagatgggggctggatatctggaggaggcccggagggacttcggctttctggccctggtggcggtgtgcatcggcctggcggtctgcctggcgggggccctgttcgccgggccgctggcccggctgctgggggccagcgatctgctgctggacgatacggtcacctatctgcgggtgcagctctgctttgcacccatggccatgctccagctcctctttgagagcttctttgtcactgccgggcggcccggcctgggcctggggctggcgactgcggcgggcgtcaccaacgccgtgctggactatctctatatggggcctatgcagatgggcatactgggcgttgccctgggcactgttacgggctactcgattcccgccgtggcgggggtgctctttttcctgctccgccggcaggggctccgctttggccgcccccacggggatctgcgcatgctgggccgggcctgcttcaacggcgcgtccgagatggtgacgaacctgtccatggcggtgactacctttctctttaacgctattatgatggcctacctgggggaggcgggcgtgtccgccatcaccatcgtgctctatgcccagttccttctggtggccctgtatatgggcttctccatgggggtggccccggtgttcagcttcaaccggggggcggggcggtatgaccggatgcggcgtattttcggctactgcctgcggtttatcctggtttcgtctgtggctattctggtggtggccctggccctgtccggggtggtggtggggatcttctccacgcccggctcccaggtgtacgccatcgccctggacggcttccgccggttcgcccccgctttcctcttcgccggggtaaatatcttctcctccgccctctttaccgccctgtccgatgggcgcacctccgccattatctcgtttgcccgcaccttcggcttcctgctgctggggctgcttctgctgccccggctgctggaggtggacggcgtgtggctggccgtgccgctggcggagctgctctcctgcctgctgtcggtctggttcctccgccgcaagcgggccgacttcggcttcggcggtggggatctcccccgacacggtggacgcggcggcggacggacctgacggaagcgaagccattataaaagcccccggcgcaacgcgccgggggcctctcattgtactttttagaaggtaataatgccctttttcagaatcttgcggtccagcagcttctggtaggcctccacggcctggtcaaaggtgaagtagtcggaaataaagtccttaatgttcagctcaccggagcgcatccactctaccacctgggcgtgggcctcgccttcctcgcgcttgcggggcatctgctggtaaatgacgcgccagttgtagtcggcagggctgaagtcgatggtgacctcctccttctcgggcacgccgtagcacagcactgagcctcggtccttgataagccccatgccctggtttacaatggcgggggaaccggccgcgtccagcacgtagtccacaccgccggggaagagcttgcgcacctcggcgcgcacatcgcactccttgctgttaatgaggtgagtagcgccgtaattcctggcctgctccagtttttcgggcaggatgtcgcaggccaccagatcctttacacccagcaggctcataaacttcaggtatgtaagacccacagggccgcagccaaacactaccacggagtcctggggctggataccgaaatagcggatgttggagagcacctcacggaaggtgacgatcatagtggcgtccacggggtccagatcgtcgtccagcaccgtctgagcaaaggcgcagtcgggagcgccgccgggccagggggctttgggatcgcacaccacagcgtactcactcaacgcgccccagccggagcccagcccaggcaggttttccgggtcaggatccacaaagggcagcagcaccttgtcgcccactttaaggcctttgaccttggagcccacctccacgacttcgcccacgccctcatggcccagcataatggggtagaccgattcggggaagcccttaaaggtgcggtggatgagcttgatgtcggtaccgcacatgccgcaggcaatggtcttaaccagcgcctgatactcgttgtaccggggcttgttgacctcgtgaacggtaatcctgccatctctctcgacgaccagcgttttcataaaaaaggccctcctttaatgaatatcgtaatattggaatgtcactacataacaagataaaaaacaaagcagcatgtatttacaagagagatcataacacaaagcatttaaaaatgcaactaaattggatgcaaaaataaaatgagttttatacatatttccatggaaaaggaaggaaataagcggtatgatactgcatatattatgatacaaaaacggttcctattacgcttgtgtgcagaatcaataatttggacagtgaaaaaacgtaaattatgcaccaatttataaaagctatattgacaagtttaaaatttgagctatactaagggcaacgatatgttactacatagtatcaatgcaacgcagtccggcgcaaaccggataccataaacacaaagtcggccgcggacaacggccgttttgtaagcaaggcaacccaatacaagaaggaggaacacccgaatgaagaagaagaaactcattgcaacggtcctctccgcatccatgctggtcggactgctggccggctgcggcagcagcacagatccggctgaaagccccactggcggcggtgaaaccaccccggctcagggcgagaccactcccgcccagaacgacgtagactatgccaattttgtgatcgatcccgcccagatcccacaggaaaagctggacaccaccctgtacctggccgtctctgtccgcggtctggagaacccgtacatcgccacgatcaacgagggcatgaagctctttgccgaatatctggattccatcggtcagaagtatgagatgcaggtgctggattcccagggcgacagcgccaaggaagtcgacaacatgcgccagtttgcggccaaggccaacggcaacgccattgcctacgccgatcccaacgaggacaccattgcctactccctggctgaagccatggcggagtccggcggctatctgggcacggcctggaacaagcccgccgatgtgggcccctccgatctggaccccaactgggtgatccacacctcccccgacaacgtggtgaacggctacaatatcgccaaggccctgttcgactccatgggcggcgagggccagatcttcgtggtgcagggcctgctgggcaacaccgcgtccaacgcccgttatgagggccttcagaaggctctggaggagtatcccaacattgaggtcgtggcggacgacacggccaactggaacaccgacgaggctctggctctggtcgaaacctggctgacccagtaccccgacgtgggcggcatctggtgcgccaacgacaatatggccactggagctctacaggcgctggacgcggcgggcctgaagggtaaggtcggcgtgtgcggcattgacgccaacaccgatattgtggaggccattgccaacggcgaggccaccgctaccgtctcctccaatggatacctccagggcggctataccctggccatctgctacgcggcctgggccggcctgctggaccccgccgcgctgcccgccgacttccgcgagtttgccacccccactgtgctgattgacagccccgaggccgcgaaggattggcagaactacaagccggagtttgacttcagccgtccctttgactgccgcgtggccgggtgaccggccggagcaccaatcctgaataacggatagtcagaacggccggggctgggatcgtggtcccagccccggcttcatattaagtctcgccgtcagagatcgctgccgtggtgtgagggagtggtccgtcctagagcgaaattggagcgacgattatgatgaaattaaatcctgcggcgaccatcacggaagagttcgccgaacgcatcaagagtgaaaaccgcagcgcaaaaatgatgaagctggcaccgttgatcgtgctggcctgtcttgtggttgtctttctcattgtctgtggggccagcttcctctcccccaagaatattatgaatattctcaaccagatggccctgcccctggtagtggccctgggactgacctttgtcattatgctgggcagcattgatctgtccattgacggaagcgtgggcatggcgggctccctgtttgcctgctttgtcctcaacagtgaatttgcgtacgatctgggtttcctcagcgtggttattgcggtaggtgtgagcatgctctgcggtctgctcatcggcctgtgccacgtctacctcaaaatcccctccttcatggcctcctttgcctttatgtacatctgcaagggcatcggtatggtctcttaccaggggcatcctcccacgatcaaggaccccgttattacggctctgcccaccaccaccttcctgggcatcccctttatcacctgggttgccattgtgatgttcctgctgtgcttttttattcaggagtataccgccttcggccggcatatttacgccgtgggcaccaatgagaacattccgcgctccgtgggcgtcagcgtggaaaaagtcaaaatcggcgtgtttaccctggccggtttcctgttcggcgtggcgggcgtcatcggcgctatccgcctgggccagggccagatcgccatcggcgacgacaagatgtttcccgcccaggcggccgtggtggtcggcggcacttcgctggccggcggcaagggcggcgtggtcaacaccattgttggcgtgctgattatgacggtgctggataacggcttggtcatgctgaacgtcaacccaaacatccgcaccggcgtccagggtgtcatcatcctggtggccgtcatcctgactgcggcccgcggcgccaaggtcatcagcaaataagggggcgggcagaatgagtgaactggaacgcaagaacggcccctccgcagtggcggagaccgtgaccaaggacggccgccggattggaacggaggtcctcttcagcgccaaggacatcaccaagacctttggcggcacccaggccctgaagggagtggagcttgagatccaccccggcgagatcgtgggcctggtgggcgagaacggcgcgggcaagtccaccctgctgaagatcattatcggcgcccaaccccagacctctggtaccatgagcttccacggcgccccctatgaacccaagacccccatggacgccaacaaggcgggcgtgggcatggtctttcaggagcagtccctgattgttaccctgaacgtggcccagaacattttctttggccatgaaaaggacttcaggaaggccggcgtcatcaactgggccaagatgaaccgggcggccgccgaggttctggccgcggtggacatcaccaacatcagccccaccaaaaaggtcagcgatctgaactttgccacccgccagatggtggagatcgccaaggttatgaacgtcaccaagcagtccggcagcgaacactgtctgatcctgctggacgagcccacttccgtgctcaacgaggctgaggtggaaaacctctacaagcagatgcgcaagatcgcggcccagggccatgcggtcatctttgtctcccaccacctcaacgagattctggaggtcaccgaccgcatctatgtctataaggacggcaccagcgtgggcagcctggacaccagggacgccgacgaggccaagctgtacgaaatgatggtgggccagtccaccaccacggagtactaccatctggaccgccagaccgcaccccaggatgatgtacttctggaggccaaagacctgggcctgcacggaatcttcaagcatgtcaacttccagcttcaccggggagaggtgctgggcctgtgcggcgtggtgggctccggcgcggaagaggtgtgcgaggtgctctgcggcgacgagaagccctccttcggggaaatctcggtccgcggcagggccgtccgcttccgctcgcccaagcaggcgctgagggagggcatccttatgatcccaaaggagcgcctgtttgagggcatcgtctctaccctgtcggtggaggataacattgccctgtccaacgccaagcagatggccaagggcccctttgtttcgggcgcggcggtgcgcaggcaggccaagcactggattggcgagctgcggatcaagacccccgggccccaggcgctgctgcgccagctctccggcggcaaccagcagaaggtggtattctcccgggccctggccagcggtgcggacatcctgctgctcaaccaccccacccgcggcgtcgatgtgggcgccaaggaggagatctacgccctgatccgcgacatgacggatgagggcaaggctgtaatcgtactgggcgatacaacagacgaatgtatcggcttgtgttcccgcctgctcgtcatgaaggacggcctggtcaccggcgaatttgacgcccccgccgaccacaagccctcccaggttgacgtggtcagcctgatgatgtaaggaggaatcgagctatgaagacaaaaactcccaatgtgtccggcaggagtgcatggctgcgggacaacatcacaaaatactttagcttttcggccatcattattctgctggtagccctctccctgacccaggacaacttcctgggcaccagcaacctcaaaaacctgctgcgcgacacggcgcctctgatgattatgtccgcaggcatgacaatggtgcttctgttcggctccattgacctgtccatgggcgcggtgtgctccgtatccaacgtgacctacatccacctgatgctggccttccaggacagcttcagcaatcctctcctcaccagcctggcggccatggcggtctctctggcgttcggcctggcctccggtctggcgctgggcatcatccacgtcaagctgaaggtaccctccttcatcgcctccctgggctttatgtccctatggcagtcggtggccctcctcatcacgcagaaccccgagtcggtgcccaaagccctgtggggcaccgtggagtggtacaagatcgccttcggtgtggtgggcctgcccctgattgtggcaatcgccattatcctgttcatccactgtgttacccgttacacccccagcggacggaccatttttgccatcggcggcaacgagcgcactgcccgggtggccggtatgggcgtggataggacgaagattctggtatttgccatcaacggcgtgctggccgctctggccggtatcttcctggcggccaacctccgctccagcgcccccaccatcggcgacccctttaccctaaagattgtggcggcctgcgccctgggcggcacctcgctggccggcggcaagggcagcgagctgggcaccatcctgggcgtgtttaccgtggccatcattgaaaacggcatgaactttatcggtgtcaacgcctactatcagaacattgtctttggtatctttgtgttggcggccatcgcccttacggtggaccgcagcatccgcggccagatcgtcaagtaagaaagaaggagtgcctcttatgtccgatgtaaaaccgtttgtgctggactttgaccttgtaagcggcttctgcacgagcggcaaggtcaagcccacccagcgcagagtgtccgacatggccgcccagtttgccaatgaggcggcggcccgggccatggtggaggggggcgaccccctgctgtatgagttctacggcctggatctgcccgaagacgactccggcgtgctccagttcggcaccaccatcctctaccccggaaaggtgggggaggagtatttcatgaccaagggccactttcacaccatcctggacacctccgagatctactacggactcagcggccacggcatgatgctgatggagacccccgagggccaggtggactggaaggagatcggccccggcgaggccctctacgtccccggacgctgggcccaccgcagcatcaacaccggcaccgagcctctggtgatgttcttcgtctaccggggggacgccggccacgactacggcaccatcgaggagaagggctaccggaagctagtggtggagcggggcggaaggcccgccgtcatcgacaaccccaaatggaaggtgtagccccgccctttgcggccgtcctgtttgatctggacggcgtcctgcgcaacaccgagccataccaccgcatggcctatgcacagctggcccgcagcctgtccgggggcgcgcccccggacgccggagagatcgcgggtaagtccaaccttcagctctatgaggctctggtggcccgctgcggcgggccggccacggcggaggagctgtcccagcggcacttccggctggtctgccagctgctggaggagtaccgggtggggccgatgcccggtctggaggaggctctgtcggccctgcgccgccggggtatcccctttggggtggtgtcctcctcgtggcgctggtatgtggagcgctgcctgcgggagctggacatgtacgaggacgccgcggtgatcgtcaccggcagcgacggcctgcccctcaagccagcccccgccccttatcaggcggcggcccgggtctttcgccccgccccgcccggcgcggtgctggccgtggaggacagcggcagcggcgtccgctccgccgtagcggcgggtctggcctgcgcggcggtatacaaccccgactcgggggcgcaggatctgtccccggcccggtggcggctgaacagcctgtacgagctgcccgccctgctggacggcaactaaaccaatccgatttttgtttacataataaggaggtcatttccatgtccatgctgcagcattccacccgcgcctggggctcccccagccgctacatccagggccgctatgagctggagaacatgaaaacccacaccgaggtctacggccgcagggtattcttcctcattgacgtgttcttcttcgccgactacaagaagcgcttcgaggccctgtacgccggcagcgacagccagatccagtgcgggcagttcggcggccagtgcaccgaggaggagatcctccgctgcaccggcctggccaaggccctgaaccccgacgtggtggtgggcatcggcggcggcaagaccatggacaccgccaaggctgtggccgacaactacaacgcggcggtgatcatcgtccccaccaccgcctccaccgacgctcccgccatgggcctgtccgtcatctacaccgccgcgggcgagcacgtgggcgcccgccactacaagaagaaccccgatctggtgctgctggacaccgacattctggccaaggcgcccatccgcttcctggtggccggcatgggcgacgccctgtccacctacccggagtgccgggccaacgtgcagtccgcctcccccaactacgtcaacagcggctatcaccagaccatcgcctgcatcgccgtgtccaaggcgtgccacgagaccatcctgaccaagggcgtcagcgccaagctggccgccgagcagggcctgtgcaccaaggacgtggaggacgtcatcgaggccaacaccctgctgtccggcctgggcgtgcagaacggctcctgcgcgggcgctcactccatcgccgagggcatcaccgtcctggagccctgcgccaagctgctgcacggcgaagtggtggccttcggcatcctggtgcagctcatcgtggagggcgcccccgccgaggagcttgacgagctgtacaccttcttcgaggaagtgggcctgcccaccacctttgacgatctgggcattcccgacgccaccgaggccgacatcaggaaggtggccgagacctccatgcactcctactgggacgtggagcccttcgccgtcaacccgcagatggtctttgacggcatcatgatggccaacaccctgggcaagcgccgcaagggcctgtaagcgggccgcggccggacggaaaggaagcgcacgcatgaaagccattcaatacaccgccccccggcagtttgccgtggtagatctgcccaagccggagcccggcccccaccaggtggtcatccgggtcaaggcctgcggcatctgcaagaccgacctgaccatccacgacggaagctttctggccaagttccccctggtgaacggccacgagttcgccggcgtgatcgactcggtgggcagcgccgtcaccgagtggaaggtgggcgaccgggtcaccgccgacaacactgagctgtgcggctactgcgagccgtgccgcagcgacaagcccctgtactgcgagaacttcaactcccacggctgcaacatgcccggcggctttgccgagtatgtgctcatcaaccacgacaaggtgttcgccctcagcgacaagctgtcctttgaggaggccacctttaccgagcccaccgcctgcgcggtccacggcgtggaccgcatcgccccccgcttcggcgactccatcctcatgttcggcgcaggccccaccggcatcatcctggcccagctgctccgccgggcgggggcgggccgcatggtcatcgccgatccccacgccgacaagctggacattctgcgcaagtatggctttaccgacctggtggtcatggacaaggccgacccgtccaagcacaccgccgagatcaaggccatcatgcccaagggcttcgacattgtcatcgacgccaccggggccgcctcggtgttcgagtcctgcttccactttgtccacatgggcagcaagattgtggcctacggcgtctgcgccgccgacgccaaggtacccgtcagcccctacgacattttcagccaggagtacaccatcctcggctccttcgcccagacccactgctttggccgggcgctggagtatctggagagcggcgcggtgcaggtcaaggagttgatctcccacgagctgccgctggaggactacggcaagggcctggactacatcgtccagaagcaggcccgcaaggttatcattcacccctgagagcgcctcctctccgtgtgccgaaaaaagcccgcccgccccggcttggggtgggcgggcttttatgtttctcgctagggctccacgtccagcatcgccatggtggcgggcatttcgtgggcggtattgaccttctcctcgtcggtgaccagatcgaagcaggagacgatgatcttgtccccccagacgcacggctcgcccggctcgtccagctcgccgtggaagccgtcggtgtcgggggagcaggccatccgcgtcacccggccgtcgggggtgatgcgggcgatggcgttggccgagaagtcggccacgtagatgttgccgtagggatcgatggtcatgccgtcggtggacttcaggttggccggatcacaggcccacttgcggttctccttcaccgagccgtcggggttgaaggtgattttgtgcaccaccccgtcgccgaagttgccgacgtagaggttgccgtcgtggtcgaacacgatgccgtccacgccgtactggcacttggggttctcggtgataaaggtgaggaagatgtggggatcggccagggtgttggtgcagtggatgccctcggcgtccagggggaagcggtagacacagctcatgagcttgccgctgtccgtcttctggcgggtcatgcagctctgggtgacgtacatgtagtccccccagatgcggatgccgttggggtgctccatgttgtcagccaccacggtgcacttcaccacccccgcgtcgttgagccgcaggcggaggatgcgcccggtgaacaccatgtggggctctccggtccagcccgcgttgtccaccagatagaggtcgccgtcggggccgaactcgatgcccatggcccgggcctcaccggtgtactcgttgcgcggcacgtcaaaccacttcttgatgttgcggtccttgtcgattttcagcacgcagctgggcatggacagatccgcaaagttgggacaggacagaatcaggttgccgtccctgtcgatggccatgccgtcgggggtgcacaccagctcctccggcagcagggtgaacagcttggatgtctgcataaagcgcattgcctccttttacgcggtcagctctttgaggaaccggcaggcccggcccgccatctcgtccagcccggtctccccggccccgccgctgagatcccgccagaccttgatatcatagggaatggtgccccccatgagcacgaagggttccatcacaatggccccctggtagttcacctgcttgagggcggcggccatatccttccagggcaggcggttggtggagccggcggggcggcggttgttctcccccacgtggaaatggcccagccagggccccgcctccagaatggcgtccaccatgctgtcctcctcgatgttcatgtggaaggtgtccagcagcacccgggcgttgggactgcccaggcgcttgacaaactccacgccctctttggcggtgttgagcaggtactgctcgaagcggttgaccacctcgcagcagtagagcacgccgcagtcctccgccaccttcatgagccgggacatggactccagggcaagctcctccttgcggcgcttctcgtccagggtgattccgtggtcgggcagggcctgccacccggcgtaggacacgccgttgaggatggtcgcccccaccttgggcatgctctccaggatgcgggtgacatggcggatgccgttctcccgcaccgccgggtcgtcgctggccaggtcgtatttggcctccaggccgatggaataggtgatgcccaggccgttgtgatcggcgcaggccttcagctcccgcagcctggcgtcgtcgtaatagccccactcggcggaggccacctcgcagatgtcaaagcccagccaggccagcttctccatcaggggtatgtatgcaatctcgtcccagttgtggctccagaagccgtagtgcattccaatcgggttcatggcgcgcctcactggccccgggcagcgcgaatcttctccacaaactggcgggcggtctcggtaattttgccgtagtcgccggtcttggccccggcggtcaggctgccgcccgcgcccacggccaccgcgccggccgcaatccactcggccacgttgtccagagacacgccgccggtgggcatcagctcggcctgggggatggggccgtggatggacttgagaattttcggcccgaacagctcgccggggaacaccttgatgatgtccgcccccgcctccatgccggccaccacctcggcgatgctcatagcgccgggcatgcaggccacgcggtagcggttgcacaggcggacggtgtcgccgttgaagtaggggctgaccacatactgggcgccggagaggatggccatgcgggcggtctcgggatccatgacggtacccgcgccgatgacaaagtcggtgccgtcatactctctggccatcttttcgatgatggcgttgacgccgggggtggtgtaggtcagctcgatgccggcgcagccgccctcgatgcaggcctcggcgatgcgcatggcatcgtcggcgtccttggcgcggaccacggccaccaggccgcaggagcgaagcttggcaagtacctgttcctttttcatgggaaaaacctccttacgcattcttgtgggacgccatgtactcgtagacgggcagcatggccttgtagcacacctcaaatgcctccttcaccggggcgtaggcggccacggcctcggggtcgggctccaccgtgcggttgatctcgagcatctggtcgatgacctcaaagcccttgaacacccccacgcccacgccgccggtgaccgcggcgcccatggaggtggcctcctccagcaggacgggcaccttgatgcgggcgttgtagacgtcggccatcatctggcaccagagggcgccctttgcgccgccgcccaccaccaacagctcgtcaatggggatgctccggcggaaggactccaggataatgttcaggttgagggtgaccccctccagtacggcccggaagaggtcgcagcgctggttctccattttcagccccagccaggcggccgtggcgtccgggttccagcggggggcccgctcccccagcagatagggcaggaaaaggacgccgttggcacctacggggctctttgccgcctccgcgttgatgagatcgtaggggctgatgccctgctctttggccacggcggtctcatatttggccacctggcccttgagccagttgtaggagctgccgccggcctgcatggtgccggtgggcgagtacagcccggggacgatgtgggcccaggtgaaggtgcgcatctcctcgtcaaagaggggcttttcgctggtggtggccacccaggcggaggtgccgatgcagctaaaggtgcggcccgggctgatggagccggcgcccacgttggagcacaggccgtcgccgccgcccatgatcaccggcgtacccgccttcaggccggtctgcccggcggcccagggggtgacctccccggccacggtggtggaggggacgatctcaggcagcttgtcgccgtcgatgcccgaggcgttgacgatcttgtccgaccactggagggtgttcagatcaatgcaggcgttggaggtggcgtcggagggctcggtataaaacttccccgtcaggcgcaggacgatgaagtccttggcgttgaggaccttgtaggtcttggcatacacctccggctcgttgtcccgcacccacatgagcttttgcaggccgtaggaggcgctgttgcggtgcccggcgatgtggtagaagtcccgcagggagatctgctcccccagggcggcggcctgggcctgggcccgctggtcggcccagatgatggagggccgcagggggttgccctgcttatccacgcacaggcaccccatcatctggccggagaaggagactgcggcgatgtcgccggggtcgatgcgggccttgtcaatcaggttgcggctggtgacgcagatggccttccagaaatcctcgggatcctgctcggcccagttggtgttgaagtagtggcagtcgtagcggaacacctcgctggtgatcattttcccctcgtcgctgaacagggttgccttgttgccggaggtgcccagatcgtgggccagtatgtatttcatcgctgtcctcccgccctacaggcccagatcgtggatgaggttggcagtagccatgcgccccatgttgcgggacgcgcccgccgtggaggcggcgcagtgggagccgagcaccacgttgtccagggtaaaccagcggggatccttgggcggctcggaggagaaggcgtcgatgcccgcgccgcagaggcggcccgcctccagcgcgtccagcagggcgttttcatcaatgaggccgccccgggcggtgttgatcaggatggcgtccggcttcattttggccagctccgccgcgccgatgaagttctccgtctccggcgtcaggggcaggtggagggagatgacgtcgcactcggcgaaaatctcgtcgggggcggcgcgggtgatgccgtgggtcttggcgtacgcctcgtcccagaaggggtcgtgggccagcaccttcatgccgaagccctgggcccgctgggccacgttgcggccgatggcccccaggcccaggatgccgatggtgccgccggtcacgtcccgggtggtgatcttcttccagtcgccctggcggcagtgctggtcaatgagcaccgtcttgcgggccaccgccaggagcagggccatggcgtagtccgccaccgcctcagcgttggcgcccaccgtgcgggagaccttgatatcccgggccttggcggcgtccagatcaatgttgtccacccccacgccgtatttggcgatggccttgagcttaggggcggcggcgatcacctcggcgtctatgggatccactcccacgatcacgccgtcgcagtcggccagcagggccttcatgccctccttgtccaggatcccgcccgtctcattgcgcaccacctccaggccggcggcccggagcatggcaaagacctcgggatcggttttcccgtaagaacggggtgtggtaagtaccttcatgacagagccctccccttggcgtcactttctcatttcccgggccagccggtcgcaggcggccagccgctctccggtgatgtcgatgtggaagacctcggcgatcacctgggtccagccatggataaagtatgtccagccgtcctcgatcagaagcccccggcgctcccgctgggcctccgcctggtgcatgaactccagggtgccccggtagttgagctcccacaccaggccgttctcggggaatttgcagtggtcggtgaggggggagccgggccggtccttgcccagcccggtggcgttgatgaccagggagccggcgggcagggcctccacaatcctgtcgttgagctcgggggtcttgcacagatggtagctcatggggacgttcaggtactccaggatgcgcacgccctcggccaggcggggggcggagcggttgttcaggtggatgcggctgggcagatccttgccgtgccgctcctcattgcccaggtaggcggagatggacagggcggagccgccggcgccgatgatgcacacctccgcgccggtcttaagccagtggccctcgggcacgaaggcgtccagggccaggccggaggagatgggatccttggcgtgggcgcggagctggccgtccagcttggagatggaggacagctccccgaagcgctgggcataggggtccaggtagtcgaacatatcctttgcggcgttatacatgtcaattttgtgtgtggtcaccagcgcgcccagggacagggggtcatcccggaagaactgcaccaccgcccggtagtcctcggcgggggcgtggatgggcaggtcgatgcccttgatctccgcgtccagccccagctccttggcccagatggggaacattttcatgatggaggactgtccggtggtgacgcccacaaagtacatggtgggccgtttggcgggttcggggagtttgatcatggtcaggcgcatcctttcttgactgatttggtattgaaataccggtcagccggcgaagagccgccggcaattgagcacggtgaaatccgcaagggttccgggggggaagccggccgcctccagccggggcagaaagcgctccagcaggtagcacaggctgatctcgccgccgtaggcggccatgcgctgggcggtggtgtccagagacaggagcagcctctgggtgtacccccgctcacacatgtgccacagcagcgccacctcctcctcgtcggagtggtacttgaagcggccgatggtgtcgtagtccaggtacacgccggtggcggcgatggcgtcatgggggccgaagtcggcggcctgccggtccacgtggcagacgatgagccgttccggcgtcaggcccgcccgaaagcagagctccagggcgggcagggtattctccccccgctccgtgtggagcatcagcggcaccccgcagcgcaccgccgcccgggcggccgcccgcagcaaaacggcgtaccggccctcggcgccttcggccggaatggcggcctttaccaggcccgcccgaaaggccgtcggctgcgccgggcggcggtccggctcgggccgccaggggagcatgccctccagcagctcaccgcagtagaggtcgtacaggccctcctcatccaggctgtggacccagcagtccgccgggtaaaagcccagcagatggtagccggtagaggccgccaccgccacgccgctctcccgcgacagcgcgccgaggcgctctgcatcccgtcctgcggccacgggctgggcgtccgccaggaagcctccccccgccgcccggtaggcgcgcagctcctccagtgaacgagccgggtcgtccagccggagggcgggatttttctccgccatgggcgtccggtggacaaagatgtgttcatggatctggctgtgccccagcgcgtccggtgcgatggggccgctgacggtttgcacatggaacatgacctgacctcctgataaagtatcgtaggattgtaactatgttactacataaaagggaaagcaaattccgcgcgtgcactcactcgcggaacagctcgacacggaaccggctctggtcgccccggtagtgggcaaaggagagctcaatcagcttgccgctctggttatagccgatggtctggaaatagtgaaccgggcggccccgcttcaagcccagaaccgcggcgtcctccgggtcggcggcccgggcctcgcagatacgggtgacgtgggtgacccgggtgtcgtcccgcttggacagcacctgatagagggactcccggttaaagtcgtgtcccaggataaagctgcacgcttcatagggcaggtaggtctccacccggacgatgggctcgtcgtcggcaaaccgcttgcggtagagatagatggccttggtgcccgcgggcagctccataagctgcgccacctcgggctccagctccaccagcttgagatccagtacctctgtgctgggggtacggccggtgctgcgtacgtcgtcgtcaaaggactggatgctctgaatgaagccctgtaccagcttggggtgggccacaaaggtgcccttgctcttgatgcggtacaggtgctcctcccgcaccaggtcggagatggcctggcgcacggtggtacggctgatgccgaacatctggctgagctccatttcggtgggaatcatgctccccaccgggtaatttccgttgtcgatctcctccaggatcagcttttcaagctggaaatacaggggaataggcacatccttatccagtctcttgtcttccagcatggcacgatcccttcctctctttttacagtcattgctttaactagattggattgttgtaacatatatacattatagtctataaaggggccccttggcaagggggtcaggcaaattctctaattttgcacaaagaaatgagtcagatatcgccgaactgaccagtcgcagccagacgctgcgcggcctacagcctctggctgaactccaccgtctctccgttggggcccagtaggttgaaaaagcgcacgccgttctcccagaaggggaggaactgaatggcatcttccaacggggccaggccggccatccgcacttcctcccaggcggactcaatgtcgtccacgtccagggccaggtggtcgatggctccgggccggcgggcgggcgcggcgcactcgtaggtttcgatgcacaggccgccgcaggtgagaaagcacacccgctcccccgtgccgggattgacagtgctgtgggcccggacaaagccaagggactcataaaaagcggcggtctcgtccagcgcggcggtgggaagccccaagtgctgtaggccggttacatgctctgcaatgctcacggcgctcccctcctcagtcgtcgctggggtccacgtcgatgaggaccttcatggtggtttcctggtgcgtatcgatgtactcgtaagcggccagatagtcggtaaaggcaaaatgcctgctcatcaggggttggagctgtaccatgccctcgcgtacaaagcggatggcatccacatagtcctcgtggcgatacatcatggtggtgttcagatccagttcggagtcgttgagcttggccagatcacagtgggccaggccagcgtacaccgcaaccaagatgataacgcttcccttccgggcgttctggatggcctgatccatggtggtgtcattgcccgcgcagtcgtagatgatgtccgccttgtcggggccgaagcactccgtcagagccgcgccaaaggggcgggttttggtgttgacagcgtaatccgctccgcaggtgcgggccagctccagccgatagtcggagatatcggtggccatgacctcggccgcgccaaaggccttcagggattgaaccagcagaatgccgatagggccgcagcccagcacgcataccttcttgcccgctacgtcccccgcccgcctggcggcgtgcaccgtgacggccagaggctccagcatggcgccctcgtcatagctcattcccgcaggcagcgccgtcacctttgaggcgtccaccgcgaagtattcactggcagttccggtggtctgaaagcccataaccttcaggttctcgcagaggttatacttgccgtgggtgcaggggtagcattcgccgcagtacacctggggttcaatggtcacccgctgacccacctggaattgggtgactccctcccccagcgccgcgacctggccggagacctcgtggccctgggtgaccgggtacttggtgtaggggtgcttgccgtggtatacgtggatgtcggagccgcagatgccgatgcgcttgattttcaccagcacctgcccgggcccggccgtgggaacgggcaccctgtcaaaccggatctccctgggggccgtcatcacttcctgcagcatggtttcttgcatcatactcacactcctttgtttggtcccgtccggtgtgcagggaggccggacgggtaaaatccatctatatcatgcgagtatgggaggggaaagtcaagaggattttcgtgaaaaatgcacagaacatcaggtaaaatcagcaccccgccggggagagagcaggggcactccggcttacccggagagcccctgctctggaatcagccctctgtgacgccgataaagccgccgccggtggtgtaaatcttatcaatgaccacctcggctggatccccagaggtgggaaccgggtcggcgggggcctcgggggcggtcagatccaccaccacggcccccttgggaggctcggtttcaggggcggtcttgccctcggtgtaccggccggacatggagaattccaagtccatcagaccggcggcatcacactgcatagaggcctccatcctgccgtcggcgtccatggactcctggagggagatggacatgggagcggaaccgtcgacatcggcggagagctctacggacaggtcataggcggatacgtcatcaccccgcatggtgagggtgaaggtgaagtcggcggccacgccgtcctgctccagggcgtagtgaaggatgcggtcgttcccgctgaccgcccaggcgtcgtcccgcaggagctgggcggccaaatctacggcctgggtcagctcggaataggcggtgtccttgtcattgggctccacggtggagagaagcagggacagcagggcggtatagtccacgtcgccggtgatcatctccatgagggcaccgtagtccaaccccatgtcctcatatatggcactcatatccatggagtaccaggtgtcggcgggcaggccggcggcctgctccaaaaatgctccgcccaggctgatatagagctgtccggactccagatcgccccggagctccatatggataccttcctcggcaagggcatccaacaactcggtatcgctggcgctcatacctccgttctggccatccgtcagagccttcaggaaggggcgcagatccatagtcaggcccatagcggcgtccatcttcgcgccgccggccatgacgccctccagagtgccgtccagggtaatgggcgcagattccgccgtacttcccagaagaaggcccgtcatgtccagagaggcgtcaaagtcggcgttcatgtcccagattcccgtgcggtacttctggccgtatgccaggtatttttccagataggtaaagtcatacttggatagggtctcctccaccagcttttccatgtcaatgaggatcacggtgcggtcgccggcgtcccagcccacggcgcagccaaaggcctgagcggcgaagcgtacgggcacataggtgcggttgtcgtgggcgtagggggccgcgtccatggggatgtgggtggtgacgccgctgcgctccacggtggctgttgtgccgcccagggccatggtgacggtggtgccgtcccgaacggcggtaatggtctgagcggcgggggaatagctcacctcggcccccatggcctcaaacacggtgcgcacaggcaggaaggtgcggccgtccctcgcctcaggtgcggcgtcagggaaggatagattccggccgtccagttggacggagatggcggtggatggggcggaggcggggacggactccgcggccagggcggaggtgccggtacccaacagggctgccgcacaggcgacagccagggcgcgcttgggaagtgtgtgcatgattccattcctccttttatcggtagagccactatagcacgctttttttgcggtgacaagagggcgggagctcttcttatgaggaaaaatcaaattttttactttgcttagtcatgtttggaataatcatcgcagagcccccgtgatactgtcaactgaggttatctatctttgggataaacggggtgcggagcttgaagatctacagaccgggcggggctgagccaggagcagctcgcagtccggctccaactggacgggctggggctgacccaaaaggccatcagccggatggagaccggggagcgggtggtggcggactatgagctggtccacctggcccgggcgctggaggttggcgttctggagctgctgggcctggagccataaaaaggggggcgttcccgtaggaaacgcccccctttttggggttagatgggcctgtgcttcagctccaggcgccgcttttcgagaatgcgggggaggcgccagaagaagatagcgccggtggtagtggcggccaggatatcggccaccggctcggccagaaacacggcgaaaacctggtcgctgaggaagcggggcaggagcaggatcaggggaatcagcaggatcaccttacgcagcagggctagaaagagggagacgcgggtctggcccagcgccacgaaggtctgctggcaggagaactgcacccccagcatgaacataccggcggcatagatgtgcagcgcccagacggcgatctccaccagctccggcttgtcgttaaacagcgagacaaacaggcccggaaagagctccagcgccgcgcaggcggcgcagctaaagcacagagaggagaaaaagagcaggcgaaaggtccgcttgacccggtccaactgcccggcaccgtaattatagcccacaatgggctgggccccctgggacaggccctggaacagaagggaaaagacctgcatgatactggagcagatggtcatggcgcccaccgccgggtcgcctccgtaggtcttgagggaggaattgaaggcgatgttgaccagactctcggtggactgcataatgaagggtgagagccccagggccagcaccggggccagcaccttgccgtccagacggagaagccgccgctgaatccgcagcttggtgcgcctgccgcacaaaaatcgcaccacccacacggcggagacggcctgggcggtgatggtggccagggccgcgcccttcacgcccatgttgaggccgaaaatgaggatgggatcgaggatgatgttgaccaccgcgccgatgatcaccgaggccatgccgatggtggagaagccctgggaggtgataaagaagttcaggcccagggccagctccacaaagatggagccgtagaggtagatattcaggtagtccatggagtagccgatggtgttctccgtggcgccgaagaggtagagcatgggctccttgcagagctggaatactgcggtggcagccaggcccaggatgatcagcagcagggtgcagttgcccagaatcttgttggcctcgtccagcttcccctcccccatgcgcaccaccgcccgggagccgccccccatgcccaccagggcggagatggcggagacaaacaggatcacgggaaagcagatgcccaggccggtgagggcgagatcgccctcgccggggatgtgcccgatgtagatgcggtccacgatgttgtagagggcgttgaccagctgggcggtgacggtgggcaccgccagccgcaggaggagcttgccgatgggatcgcggcccaggtcgttttcgcgctttgccatgcctcagtcctcctccttttccaggaaataggtggcctccatgtcggccacgctgagggcaaaggccaggggatactgctggagggcctggcccaccagccgcttgtcctcgtcgccggagaagcccatgtgccagcggatggccatggcctcctcccgggtgaggcgcaggaagccggagaggatgtagacgctcttctccccgtggccgtagggcagggggtcctcgtagaaaaaggtgggcaccgcctgccacttgccgtcggggcccttcacgttgcgggagccctgcctgtagcagcccgtcttgcacacgtcgtggagcagtgaaaccagcgcggcgctctccgccgggtactccaggccgtacagctccttcacccgctcccgctccaggtaggcggtcaggcagtggtagacattgacgctgtgctcacacaggccgcccgcgtaggccccgtggaaccgggccgaggccggggcggtgaaaaaatcgcttttgtgctccaggtagtccagcagggcatccgccccgtcccgccggatgttctcccggtagatctcgataaattcttccttggcgctcatggggcagtctccctttctgtttgacagatagataagatccagtatagcataaactccagcgaaaagccaccctcggcacccctgtttcacacctggcataggatgggcggaataggaggagtgctatggaatggctttcgctgcttctggccgcggtcctgtttgccgcggcctgtaatctggatactgtaattctctccatgggctacgcggtgaagggcgtgcgggtctccctgtcccacagcctgattatcgccgccctcaccaccctgatcacctgggcctccctgctcctgggggccggggccgcccgggtgctcagcgggccgctgcccaacctgctgggcgggctggtgctggcgggcatcggggcgtggttcgtgctggactggctgcgccgcctggggcccgccggggaggcggagggggaaaaccgggccgccaccctctgggggtgcgtctccctggccgccgccctggcggtgaacaacgcgggcatcggcgtggccgccggggtgtccggcatcgcccccggctgggcggccctggcgaatttcctggtcaccctggccgccctccccctgggccgcgccctgggggataagctggccgggcggctgctgggcaaatacgccctccccctctccggcgcgctgctggtgctgctgggcatctgggaggcggtgggctaggccttgtttgaaaatagtcaacacgcccaatcgccgggccgtttgccctctggacggcccaatttttccttgaaatccgccaggattcctgcgaaaaaattgcttgccagcgggtaaaattcctcgccgctggccatattgctatttttcaaacaaggcctagtcctggcgcggcgggcggagatgtggtagaatacccccgaaagaagggattgcatatgacgcttttggagcgcctggggggccgggaggccatcacccggggcatcgtacacaccttccgcatcctctcccgccgcccccgcccctcccggcacgaggaggccgccggggaggagctggacgcatacctgcgggggctgggcctctcccccgtccgggacggggcgggcaaccggatggccgacgtgccccccgcgccgggccggggacgcgccccccgcctgatcctccagggccacctggacatggtgtgcgccgtccggccgggcagcggctggaaccccctcaccgacccggtgacggtggtggaggaggggggcttcctccgctcggacggccgctcctccctgggggcggacaaccacctgggcaacgcggcggcgctgtggctcctgtccaccggggcggtgaaccacgggcccctgcgcctgctcttcaccaccgccgaggaggtggggctggagggggccaaggaggtggcgcccgactggctggccggggcggaatacctgctcaacaccgacggctttcacctgggccgggcggtggtgggctcggccagcggaaggcgggagacctgggccgccccgctggacgccgggccggccccggcgctccccgcctggaggctcaccctctccggcggccggggcggccactccggcgacgacatcaaccggggccgggccaacccgatcaagctgctggccgcctatctggccgggctgcccggcgggcggatcgcctccctctccgggggcctgacccacaacgccatccccgcccaggccgaggcagtggtattctgccccgcggagcccgacctctcccccctgcggggcgccctggccgactaccgggcggccgatcccggcctgaccgtggcctgcgccccggcggagaggccggagcgggtgtggacgccggccttccaggcccacgtcctggcctttttgatggggctgtaccacggggtgtacgccatggagccggccttccccggtacggtgggggcctccgccaacctgggccgggccgggaccgagggggatgtttatgaggtgtgcgccttcctgcgctccgcccggccggagtgggaggcggagctggctggccggcacatggccctgggggcggcccacgggttctccctgtccgtcaccggctaccccggctggcccggcgaccgggccaaccccctggcggcggtgctgggccgggtgtggcgggagcagaccggccggacgctggagctctccgccgtccacgtggggctggagccgtcggtgttccgggccaaggccccggggctggtcatggcctccgccgggccggacattctggacgcccactcggtggatgagcgggcacccctggacgggctgcccgattacgccctgctgctggccggggcgatggaggccctttagacgggcggccgtccacgcaatacaacagggtacaagcaagaaagtacgcgccgcccgccggagttccggcgggcggcgcacatgtttacgcgtaaatatgatccaggatatccacaatctgcgccacgcagctctcctcgcaggcgcccaggatacgggcgccccactgcttgacctcgggggcgcagttggcgggggcgaaggggatggcggagacggccagcatggggatgtcgttctggttgtcccccacgcagtagatgtgctgggcgtcgatgcccaggcggcgggccaggtactgcaccatgccgcccttgctgctccccttccgggtcagctccagcagcacccggttggagaagatcacctcgtaatgctctccccaccgctccagcaggtagcgctgggtgtgcaggagggtttcatagtcctgctggagaatgaccttgctccagggcagggggatatccgcaatgggcacctcccgggcggtaatgcctgcccgctccaggtggcgttgggtgacggcgttgggctggtagacgtagatggcgtcgtggtggtaggcctcaaagccgatggtgggaatggcccgggccatctgctggagatcctcccgcacccggtcgggcagaaaggtctcgtaaatcatctcccctgtccggaagtcgtacagggcggagccgttggacagaatcaccggcgcgttgatgggtatgtggctagcgtggggggcgaagttggggcgggcgcggccggtggccacggtgaaggtgcccccctcccgggtaaagtaggtcagggcctccacattttcccgggtgatgcgcatgtcctccccgtagagggtgtcgtcaaaatcgctgaccagcagcacgccgttaaatttgcccaactgattcacaccttaccttctcagatcggcccccgtcatatacgttttcagcggtgcatagagaatgccaaaaatcaccagacacaggacaaggtcaatcccgacatagctgccgttgtagataagggagtagagggcgggattgtcgaatactgtgccgaagatctccgtgggggccagaattttgtaaatggtgataccgctgatatagtggacaacaaagcgggcggctccgcccagcacgctgccccagaagatgccgtggggcttgccacggcccaggccggcgatgcccataacaccgaaggccagcacataatccagcaggatggactgccagccccagcttaccgcgccctggatgaatacctggagtacgccgaaggcaaagcaggcgatgaagccgcctcccatgccccagcgcacgcagaagaacagcagggggagcatctccagcgagatggagccgccctggggcagctcaaataccttgagaagccccagcaccagggcaagggcgatcatgagtccgccttcgcaaagcatccgcaccagcagatacatacggcggcggccaggggcttttgtggtgacaggttcagacatagagctcattcctcctaaaaaatgtaccgcagcgcaaaccggaaacagcgcaatgcggtacgggagaaacgacctctatcgtcgaatactcttcctacgccggcattacccggatcaggtttaagggacacgggcggccatacgccctgatctcagccggacttgcgtccagcacccctgcgattcgatttgttctacggttattttagagtttataccaaatggcgcagctttgtcaacacttgggtaaaataggcaggcagggggcactccacggtgacccgctccccggtgcgggggtggacaaaggagagccttctggcgtgaaggcactggcccgccaggccggggacgggcttcttggccccgtataccacgtcccccagcagggggtggccgatggaggccagatgcacccggatctggtgggtgcggccggtctccagacggcactgaatatgggtatagccggggaagcgctccaacaccgtccagtgggtcaccgccggacggccgtttttccaatccacgcacatcttcttccggtcggtggggtggcggccgatgggcgcgtccacagtgccgccgtcctcccgcaggccgcccacgcacaccgcctcgtactcccggtaaagggagtgatcctggagctgggtggccagggcctggtgggcatagtcgttcttggcggcaatgagcagccccgatgtgtcccggtcgatgcggtggacgatgccggggcggagggctccgttgattccggagagtgattcaccacagtgatataacagagcgttgacaagtgtgccgtccggatggcccgccgccgggtgaaccaccaggcccaccggcttgttgaccacaatcacgtcggcgtcctcatacgccacgtccagggggatggcctgggggagcacgtccaccggctccggctccgggaggcgcacctccagcacgtcgccctcggcggccttatagttctttttcaccgggcggccgccgagggtgaccgccccctcctccagcaggcgctgggccgccgagcgggtcagctccggcaccagccgggccaggagctggtcggcccgctcccccgcccggtcagcccgcaacagaatcggctccatggccctcctccttgccgtggaagaagaggtagtacacgcagaacgcgatgccacccaccaccacgcagatgtccgccacgttgaagacggcaaagcgcatgaacagggtctcaaacatgtcggtgacgtagcccagcagggcccggtcgatcaggttgcccaccgccccggccagcaccatggacagggcggccatggcgaaggggcggggaaagacctttttcaccagaagcaccaccagcaggacggacaccaccagggacacaatggtcagaatccaggtgtgctcctccagcagggagaaggccgcgccggtgttctgcacataggtgagatggagaatatgggggagaaaggggacgtctccccccagggggatgttggcccgcaccaggaacttgaccacctggtccagtaccaccagggccaccacgagaacggcgtataacatgggcaaagggctccttttcttcggttttgttctattttatcacggcctgccgccgggggcaacccggaagatcggatgtagattccaattgaagaaacaagaaaaatctggtatactggggcaaaaagccgaaaggtggtgagtgcgttggatgaaaggcggaccctttcgttaaatgtgttcctgaatacccttgaggagggctgtaaaaacgagcggcgctactgcttcatcctgggcgccggggcctccaagacctctggtatccccaccggggaggaactggccaaacagtggcacggggagattttggagcaatgctccaaggaggagatcaaggagctgaaaaagcggctgggggtgcgctcgaccaagccgtccagccgggcctattttgacctctatgccatgcgcttttttccggactatcagaacggctccgcttttctggagcggacgctggagcgcgcccagcccagcctgggctactatcccctggccgccctgctggccaacacgcgcaacaacctggtgatcaccaccaatttcgacagcctggtggaggacgccctgtttatctacacggataaaaggcccatcgtcatcagccacgagctgctggcccagtacatcaacttcaacaccagccggcccatcatcgccaagctccaccggggcctgttctttgaccccctcaaccgggccgagcaggtcaacggcctgtcgaagcagtggaaggatatcctgcgggaggccttcaagcgttatacccccgtggtgatcggctatgccgggggcgaccacagcctgatggactttctgaaggagaccgagtgcctgagcggcctctactggtgctaccgccacgacgagccgccggaggagattcagaaggtggtggagcgccacagcggatactttatccccattgagggctttgacgagatgatgtacctgatggggcagcggttcggctatactgacccctgcgagcatatcgaaagcgcggccgagcagcgggtgagggactatcaggagcaggtcaaggcatttcaggagaagctgcgggccgcggagacccccagcgagacccagagcgccatcctccgggccatggacgccaaacagcgggaggagcttcagcggctggaccgtcgcatcgagctggacgaggaggacggggaggcctactgggagcggggaaagctctactattttgccaacgactatgcccaggcgctggaggacttcacgaaagccaaagagttgggaatggaggacagcaagctctactggtataaggggttttgctacagaaggttgggagaaacagagctggcaatccgggaatacagccgatcgctggaactaaaggagacttcggaggtgtaccgcaatcggggcctgtgctttaccactgtgaagctgtatgacaaagctgtccttgacttcaccagggcaatcaaactgccaccgggggacaagaggctttacagggagcggggcagcgcttaccaagctctggaggagtataaaaaggcccaggccgattatgagaaggcgctggagctggaaccggccgatgcggagctctatacgaccttgggagatgtgcaggaaaggcttggagaggtgcaggaggccctgcagagctaccaaaaggccatccagatcgaccctaattatgcaagagcctataacaaccggggggttgtatacttgtcccagatggagacagaaaaggcgctggccgatcaccgaaaggcggtcaaactcgcgggagatagggcgctttatcatgtgaacgtgggaattgttctcaacaggctggagcgatacagcgaggcggtcacaagctgtaacaaggccatcaagctggatccagggtacgccaaggcatacgacatccgtgccgatgcctatgagggtctggagcagacagagaaggccgaacgggattgggagacctaccgcagcctgacgaaaaaaacggaagaagaggaggacacgccgcaggcatagcctgcggcgtgtccttttgcgcgggcgcgccctgcagccgcggcgtaggggcggggcttgtccccgcccagggggccgatgcggacagaagataaattgccttgaaggggcaagcggggccaccctggtgggtggctatacgggaagggagaaaatacaggcttgtaggggcgggtgcccacacccgcccgcgggcggccacaagggccgcccctacagagtctgcgcggcggcaagccggccggcccgccggtgcgggacggcaaaatacgggctctgggcatgaaagaaacaggacgccgcagtgctgcggcgtcctgtctgttccatctgcggggttactcacccaccacggcggcgcagcggtcgcacagctggttgtggtggccgtcggcgccgatgtgctcgctgtggttccagcagcgggggcacttgggggactcgtccagggcgacggcgatggtgcaggggatgaggcagtcctcgctcttctccccctccacggccccggtggtgacggtgaccttggagacgatgcacagggaggccagatccaccccggccaggaaggcggcgtcggactcggacacggagagggtcacgtcggtgtcctgggccttcttgaacacgccggcgttacgggcattctccagggccttgttcaccgcgtcgcggaggctgaccagcttcgcccagcgttcccgggcggccgcgtccagggcaaaggcggcgttgtcgccgggcatgtcgttgaacaggacactctcggcgtttacgccctgggcgtgcttcatggcgtgccagatctcgtcggaggtgaaggccaggatgggggcgatgagccgggtcatgccgtccaggatgtggtacagggcggtctgggcggagcggcgctcggcctcggcgccgcagtagagccggtccttgatgatgtccagatagaagttggacatgtccaccacgcagaagttgtagacggcgcggtagacggcgtggaactcatagcggtcgtaggcggcgcgggcggtcttggccagctcgttgaaggtgtgcagggcgtagcgatccagctccatcaggttttccgccggcaccagatcccggtcgggctcgaagtcgcacaggttgcccagcatgtagcgggcggtgttgcggattttcaggtaggcctgggagagctgcttcatgatgtccttggagatgcgcatgtcctgggtgtagtcggcggaggccacccacaggcggagcatgtccgcgccgtagtccttgatgacctcgtcgggggagacggcgttgcccagggacttgtgcatggccttgccctcgccgtccaccgtccagccgtgggtggcgatctgcttgtagggggccacgccgttcacggcgatggaggtgagcatgctcgactggaaccagccgcggtactggtcgccgccctccaggtagaggtcggcggggtacttgaggtaggggcgctcggccgccacggcggcccaggtggagccggagtcgaaccacacgtccatgatgtcggtctctttggtgaagtgggccttgccgcacttggggcagacgaagccctggggcagcaggtcggcggcctcccggtcaaaccagacgttggagccgtgctcccggaagagggcggccacgtgggcgatggtctcgggggtgacgatatcggccccgcagtcgtcgcagtagaagatggggatgggcacgccccagacgcgctggcggctgatgcaccagtcgttgcgctcggtgatcatggaggtcatgcgctccttgccccactcgggcttccactggatggagtcgcaggcctttaccgccgcgtccttaatggcgtccacggagcagaaccactgctcggtggcccggtagatgatggggtgcttgcaccgccagcagtgggggtaggagtgggtgatgttctccttggccaccaggaagccctcggcctccagatcggccaccaccatgtcgttgcccttggcgtagaactggccgttgtagcgctcgtcggtcatgacgcccttggcgttgacgggcacgggcacgccgatgtgggtcaggccggccttgtcgtactgctggcaaatctggaagtcctccgcgccgaagccgggggcggtgtggacgcagccggagccggcgtccagggtgacgtgctcgccgttgaggatgacgctctcccggtcgaacagggggtgcttggcgcgcatcagctcgaacgcgctgcccttgagggtggccagcacggtgcaggcagcgtagtcaatgcccgcggccttgcacacgctctcggccagatcctgggccagcacgtatacatcgccggagggcacctggaggagcacgtagtcgaactccgcgttgaggcagatggcgtagttgccggggatcgtccagggggtggtggtccagatcacgaagtaggtgcgggacaggtcggcatactggcccagcttgcccttgtcgtcggccacggggaacttgacgaagatggtggtgcagggatcgtcggcgtactcaatctcggcctcggccagggcggtctggtcaaaggggcaccagtacaccggcttcatgcccttgtagatgaggcccttctccgccatcttgccaaagacctcgatctgcttggcctcaaactcgggcagcagggtgatataggggttctcccactcccccagcacgcccaggcgctggaactggccggtcatcttctcgatgtagctctcggcgtactcccggcacttggtgcggaactgggcggtggtcatctcgtcccgctttaccttcttgtccttcagaacggcggactcgatgggcaggccgtgggtgtcccagccgggcacatagggagcgcaccagccggtcatgttgcggtgcttgacaatcatatccttgaggatcttgttcagggcggtgccgatgtggatgttgccgttggcgtagggggggccgtcgtggaggacaaaggtgggcttgccctcgttgcgcttcaccatcttgtggtagaggtcgtggtcatacatctcctggagcatctccggctcccgcttgggcaggcccgcccgcatggggaagtcggtctggggcaggtggacggtctggttgtagtccatgggtcagttctcctttatctttgatataaaaacaggttggtgtaaaggcgtgcgcccttgccgaaattggcaaaaacaaaacgcgcctttgtctcctgtaagagacaaaggcgcaaacctctgcggtaccactctcattgccgcggcgtgccgcggcccctcgaaggccggtaacggggccagccgttcccgcttactgccccaggggggattcggcgggacgctcggaggtgatcttcccagcccttccctgtccgccttgcaccaaaacggcggctctctgcgcaggggcggggacggtactcgtcctcttctcggcgttttgcgaaataaaagatactcggagacacgaaacaacgtgtctccgagtatcttacccgttaaatgcccttctgtcaagggggtttacttgatttcatagtccttgccgaactggaggtggtcaaaatcgatgcggcgggtgggctcggtgggctcctcagcctcctccggactgtgggagcggctcagctccagcagctcggcatacaggccgccgtccttctccttggcgccgccgccgagatccaccgtgtcctccgcgtcctcctccggcgcctcaccggccaccagcttctccacgctctgggagatgtcctgggcggcagaggcaacctggtccaccacaggctccgccggggcggagagcttggacagtccgttgaggtagtccatctcgtgctgatagagctccttgagcttgcccacataggcggcggtggcgttctgggcggcggtgaggcgcatctgctcgctgcggatgtcctgctgcagctccgcaatacgggccttggcctccgtctccgcgttcttcagcagctcggccttcttggcctccgcctgggccaccagctcgtcggccatcttctgggcggtaagcagggccttgcgcatggcctcctcggtggagcggtactcctccaccttgtccaccagtaccttcatcttggccttgagggtggcgttttccttatagagcgtggtgtagtccgccgtcagtacgtccagaaattcatccaccatcgccatgttatagccgccgaaggacgccttggcaaaggcgtgctcggaaacttcctgtggtgtcagcataacgtcattcccccgatttgttcatgtcttccccacccgatgctccgcatcgggcgggaaccccctctttggcatctgccgggcaatgtggattcgcccggcatccgtgttttggcggtgccaaaacgcttgaaacgccggactcccggcgggacaacccggacattttcctgtcctgaagagcagttcagaaatacagcccgttgttctccagttcgtcaatcagatcgcctaaaatatccacgttgtagggcgtaataatataagtagagatggccacctttttgattttgccctcattggcataggccacgccggagaggaaatccagcaggcggcgggcgatatccttgttggtggactccaggttgagcaccaccgtgcgcttctcccgcaggtggtcggcgatctcgctggcgttctcgaagcgctcgggcttgaccagcaccacctgaagctgggtggtggtgtggatattgaccaccttgttgctccggcgctcgttctccacggggaagatggggccggtgctgtcctgggccttgggggccttccgctccaggcggtcgccgccggtgcggtccatgcgctcgctgcgggagacgggctcgaagtcgtcaaactcctcctcttcctcttcgtcctcataggggcgggccaggcgcttgagttcatctaaaaatcccatttcggtaacctcccgaatttgttctatcctttgtgcatgggaggacggggcccaaacagggcggtacccacccggaccagggtggccccttcccgcacggcgtcctcaaagtcgccgctcatacccatggaaagacagtcaaagctagtcttattatcatccatctgacttcttatgtcaacataaagctgacgcatttttgcaaaaaacgggcggtttccgtccggcccggcggccacgggagggattgccatgagcccccgcaggcgcacatgggggctgccaaccgcctgggcggccagggcggacagctcctccggggaaatgccgctcttggacgcctccccgccgatgttgacctccagcaggatgtcctgtaccagctccagcttggcggcctgggcctcgatggcctccagcaggtgctcggagcccaccgactcaatgagctccacccggcccactacctgccgcaccttgttggtctgaaggtggccgatgaagtggagggccgcgccggcgtaggcgtcgtcgtccaggtgggcggtcatctcctgcacccggttttcaccgcagatggtgacgccggcggcaatggcctgccggatggtgtcggaggtctgcaccttggtggccgccaccagggtgacctccgacggctcccgacccgcctgccgggcggcggcggcgattttctcatttaccagcgcaatgcgctctgcaagggacatgtgtcattacctccctgtctatgactgcgtgatcacttttccgtcaaagagctccaccgaggagaggattacctcgtcgccggcccgcagggcctttttgccgtccgagccgtctgcggacttcaccagggcgaaatcctccagctgggccaggatggtgacgggcttaaactctgcctgctggcccaccaggacgtacacgccggtgaccagctcctgcttttcctcctccgtctccgggtcggtgacggtccgctcctccacgcgcactgcctgcgtaggcacgcggatgccggtctgactgtcaaagaccagctccactgtctgctttcggagcagggtggtctcagacagatagcggtcggaggacagcaccacggtcacccggccgttctccggggtctcccctacccgctccaccttcatgtccacctcgcccgaccagtcccgggagaagcggacggtgacggtgcggccctcgatgagccgcccggcctcctcctcgcccatggcgcagacaaagtaccaggtggcatcggtgaccagcttgcccactgcgccggcgtccggctggggccgctggcggtcgagctggctgagctggccgggggtgatggtctccagcagagcgggggtgagcaggctctcatagccgtcggtctgcccggaaaagacccccgcctgactggcggtgaggcggctggtgtcctgggcggcctgggcgctcagcgccgcaatctgggcgtccaccgcgtcaatggaggactggatggcggcggcggcatcaccgtcctcttccccgccgttgaaggtaaagtcccgcttgtagaccaggctcttgagcagcagggtctcgtcctccagctgggtgagatccccggtggacaccgaggagcgcagggccacgatggcgtcgatcacctgctggctgagctgggaggagtcgccgccgctctgggtccgctccagggcgtattggagctgctccttttccatggtcaggctctgtagctcctccttccgcgccaggccggagtcattctggtagagcagggccaccgtctccccgcgggagaccttctctccctcctcgggcagcagatccacaatcccgccgggactggcgagcacgcgctcctcccgcaccagaaagccggtggcctccagactgtcgtccacagtgtaggcgtaggacagcaccagggtatagggatcgcggaagctccgccaggcggacacgcccagatacaccaggacggccgccagcagcagcagcatgacaattcggttgatcagggttccttgcttcatggcagctccttagtctgccgccccctccgcctccaaagagatggcccgctccggcacaatggtggagatggcgtgcttgtaaatgacctgctgcttgtcccccgtcataagtaccaccacaaaggcgtcgtagcccgtgatctgtccccggagctgatagccattcatcagaaatacggtcaggctggcgtgggacttgcgggcgcggagcagaaacaggtcttgcaggttgttggtcttttgcatgtggatgcactccttctatctataagatgcatccaatatataccaattatcgggcggatttcgtcgaaacggcgcggggctgtgtctcttcggcgttttcccccacggcccccgccaaacttggaagcgagtgcgctgtacccgcctgggcaaggccgccacggactgcggtgggccggaattgccctaggtttgactgtggcttccacgtaggggcggcccttgtggccgcccggccgagcgatagggctgcgggcggtgcgcggtcaaatcaggctcttccgaagcgtttttctagctgctggcgggtcagctcaatggccaccggccgcccgtgggggcaatatttgctccccggcggacctgtccaccgggggccccgagaggattttacatcctcggggcaagtgaattgcccctgcggcaaggttttcgccggaggcgaaaacacttggacgcgccaaaggcgcgaagcgcggtcaaatcaggctctgccgaagcgtttttccagttgctggcgggtcagctcaatggccactggccgcccgtggggacagtatttgaccgcgccggacatgaccgcctgggccaccttgagcagctcggcggggctgttcctctggccgcccttgatggccgccttgcaggccatggtgtggagcagggcgtcccgggccgcgccggggtcggcggagccgccggtgagcaggcggccggccagctcggagagcacgtcggggatctccccggcggccacgtcgctgggggcggcccggacgatcagcgccccgccgccgaagtcctccgcctcaaagccgaagcgccccagcagcgggagctgggccagcagggcggccccctcctccgccggaggggtgaacaccaccggctccagcagggcctgcaccatgggctggtagccctcggccttcatccggtcgaagttgagccgctcatgggcggcgtgcttgtcgatgaagagcaccttgtctccctgctccacgatgatgtaggtgttgagcacctcccccgccatgtgccagggctcctcctccgaagggggcgctgagggctggccggctgggcgggcggccataaaggccgttcctaccggatgggcgggcggggcttcggccgggcgggcacggccgtctgttcgcgcgtgcggcgcggcggaggttgggggggcggagacgccgttcccggcggggacaggtgcggcttcggccgggcgggtatgggtgtccgccccggcggactgggggatggagatgggggcgccggagacgccgttcccggcaggggctgccggggcggcccctgtggcccggggggcggtgaagtcgtggaggggcaggggcgctgcgggccgttccgccgtccggcggaactcctccagggtcatctcccggtaggcgggggccgccggagtgcgctccgccgggcagaggggagactgcgcaggccgccccccctccgccgggcgcgggggctccacctggagggacggccgggtgcggtcggcctccagagtggacttgacggcatagtacaccgcgtcaaagaccttcttgtcgctgccgaacttgacctcctgcttggtggggtgtacgttgacatccaccgcgttgagccgggtggtcaggtggaggacacagccgggaaatttgcccaccatcttctggttggcgtaggcctcctccagggcggccatcatggtgcggctcttcacataccggccgttgacaaaaaagtgctggtagccccgggtgccccggcagcaggtgggcagggagacaaagccggataccgacatatcctcccccgagccctttaccggcgtgaagcccagggccatatcccggcccagcacggcgtagagggccgactgcacctgcccgtcgccgggggtgagcagctcctgcttgccgtcccggaggaacttgacgctcacctccgggtgggacagggccacccgctgcaccatggcgaagcaggccgccccctcggcggtgtcctttttcaggaacttgagccgggcgggggtgttgtagaacaggtcgcgcaccaccattgtggtgccctgggggcagccggcctcctcccggtgcaccaccgcgcccccctccagggagagggcggcccccaaatcctcctccgccgtgcgggtgagcagctcgatgcgggagacggcggagatggccgccagagcctccccccggaagcctagggtgccgatggcctccagatcgtactcggtgcgcagtttgctggtggcgtggcggaggaaggcggtctccacctcggcggcggcgatgccgcagccgttgtcggtaacccggatgaggctcatgccgccgtgctggatctccacggtcagggcgtccgccccggcgtcgatagcgttctccatgagctccttgaccaccgacgcgggccgctccaccacctcgccggcggcgatcagatcggccacgtggggatctaattgcagaatgtggggcatagaagcacctgctttctaaaaagggaaaatggggcccccgccgaagcccagcgaagcgtgttcggtggggagaggaggcacagcggaacgagcgggctttgccgtatacggcaaagcgaggaatgggcaagtttgtgccgacgaagaagcgcctgcgttccaagcggggaaataagcgtaggggcgacccttgtggtcgcccgcgggcggcggggagggccctccctacgctcccaggacggcggaggcgagaatcagggcgttgagcaccatgtgcagggcgatggggctccagatggagccgccgttgtcgtagcaccaggtcagggccagggacatgggcacatactggaggaacagcagcaggtagcggaaatccaccgtgccgtaggaatagacgaactgccagacgcagtaaagggcaaaaaccagggtggagagcacatagcccagcacccggctgtaccgccgggtggcgccgaagagcaggccgcggaacagaggctcctccaccaggggcatgagcaccaccaggatcaccaccgtggccgccggggagagggcaaactgctgggcgtagctctccgggttgggattctgtaccggcaggggaatgagcatgaccagcagatggagcacccccgccccgacgagcccggtgccgaaggcgaacaggttttccggcagccagtccagcagcaggtcaaacccgtgccgcaggaacgtccagaagaccagaaagaccagggtagcggccaggaggtagtagaccacgttggcctcggccacgggcagttccccgtggaaagcccgctgcacccaccccatggacaggggaaagaccgtcaggtacagggcaaagaacacccacccgcggcccatctcggcgcgggtgagctgcggacgccatggacggcgtttggtgtgcatggtggaggtcctctctttctctcggaaattggggtgcggcccggcggagcgggccgatgcgggcagaaggtgaattgccccagaggggcaagagaagccgccctggggcgtcggcccctccggggcagtccaatcggatatcaggacgtgcaggggcggggcttgtccccgcccgcgtttccggtgtcccgccgctgggtttaggcgggcggccacgagggccgcccctacagagtgcgtgggagaccggcggcccctctcgtcaaacgccgacacgcaggggcgggtgcccacacccgcccgccggggcggggactagagcatctgcttgagctcgtagagcaggttcatggcctcgatgggggtgagcacattcacgtccacatcccgcaggcgggcggccacctgggccgagcccatatccagcagggagacctgctcctccggctgtgcggcggccggggcgggggcggcgggtacgcccgcctccagctcctccaggatcttcctggcccggcggagcaccggctcgggcaccccggccagcttggccacctcgatgccgtagctctggtcggcgccgccccggacgatcttgcgcaggaagaggatgtcgtccttcttctttttggcggcgatgttgtaattctttaccccggggatctgcccctccagggcggtcagctcgtggtagtgggtggcgaacagggtcttggcccccaggcgcttcttatccgcgcagaactccagcaccgcccgggcgatggacatgccgtcgtaggtggaggtaccccggccgatctcgtccaggaccagcaggctcttggcggtggcgtttttcagcagctcggccacctcggtcatctccaccatgaaggtggactgcccggcggagaggtcgtcgctggcgccgatgcgggtgaagacccggtcgacgatgccaatgcgggcggagcgggcggggacgaaggagcccatctgggccatgagcacaatgagggccacctggcgcatataggtggacttgcccgccatgttggggccggtgatgatggccaccgtgtcgtcgcggttgtccatgtgggtgtcgttggggacgaagagggcgtgtttgagcatcttctccaccaccgggtggcggccctcggtgatctcaatggcgtcggagaggtccacctcggggcggcagtagccctgctcggcggccacggcggcgaaggaggagagcacatccacctgggccacggcggcggcggagcgctgaatccgccccacctgggcggccgcctgctcccgcaggtcgcagaacagctcaaactccagggcggtgatgcggtcctgggcggagaggatctcgtgctccagctccttgagctcctgggtgatgaaccgctcgcagttggtgagggtctgcttgcggatgtaggtgtcgggcacctggtcgtagtaggacttggacacctcgatgtagtagccgaagaccttgttgtagcccaccttcaggctcttgatgccggtcttttccttctcccgggcctcaatggaggccaccaggccctttccgttggccataatgtcccgcaggcggtccacctccgggtggtagcccgcccggatgaagccgccctcccggacggagaaggggggctcgtccacgatggcccggccgatgagctcccgcagctcggtgagatcgtccagctcctcccgcagggaggccagcagggcggaggagcagccggacagccgctcccgcagggcggggagcctgcccaggccgtttgccagggccaccagatcccgcccgccggcggtgccgtagacaatgcggccgatcagccgctccagatcggtgatttcccgcagggtgagggtcagctcctcccggccgatggcgtcgcccaccagctcccctaccgcccccaggcggcggccgatggccgccggggagagcaggggccgctccatccacgcccggatcagccggtggcccatggcggtgcgggtcttgtccagcacccatagcaggctccccttcttctccttggagcgcagcgtctcggtcagctccaggttgcgccgggcggtgagatccagctccatgaactgcccggtggtgaagtacgtcagggtggagaggtgggacaggtcggtcttctgggtctcatagaggtaggacagcaggccgcccaccgcctggagggcggcgtcgtccccggcgggcagggcgtccaggccggcggagaactgcttctccgccgccgtgcgggccgcgtccagccggaagcgggcctcgcccccgttctcgcagcggcagtccaggcgcttgaccaggaagtctaccagggccccgtcgctgtacgccccgtcggagagcatggcctcccgaggggtgaagcggcccagctcgttatagaggtgctcgtccgcctccggcccggtgaaggaggtgacggagcactcgccggtggagatgtcgcagaagcacagccccgtgcccgcgctgtcccggtacacggcgcagatgaagttgttgcgcccctcctccagcatggaggaggtcatcaccgtgccgggggtgatgatgcggatgatgtcccggtccaccagccccttggccagggcggggtcctccatctgctcgcagatggccaccttgtagcccttggcgatcagccgggcgatgtaggcgtcggcgctgtggtagggcacgccgcacatgggggtgcgctgcgcctccggcttgccccggtcccggctggtcagggtcagctccagctccttggataccagcttggcgtcctcgttgaacatctcgtaaaaatcacccagccggaaaaacaaaatacagtccgggtgcagctccttcatgcgcagatattgctgcatcatgggcgtggtctctggcggcatagcgtctctcctgttctatctctctgtgtagtagcaatccagctcccagcgcagggggttgttgtcaatataggtccagatgcgcagaaagtcgttttcactgcggacaatatggtcgtagtagccccgctgccaaaggcggccggcctccagtccccgcccggcggccagatggacggaccgggatttcacggtgcctacaagccgccccagttctgtggccgcccgcggcccactgtctgtgggggcaacccttgcgtccgcctgcgtcccggctcctgtgggggcaaccctcgcgtccgcctgcgtcccgcggcctgtgggggcaaccctcgcgtccgcctgcgtcccgcggcctgtgggggcaatccttgcgtccgcccgcgtcccgctgtctgtgggggcaatccttgcgtccgcccgcgtcccgctgtctgtgggggcaacccttgcgtccgcctgcgtcccggctcctgtggggacaatccttgcggctactcgcgtttggccgtctgcgggggcaatccttgcggccgcctgcatcccggcccctgtaggggcggcccttgtggccgcccgttccagcgtcaggagcaggtggacatggttgggcatgataacctggtgctccacccgtactccggtaagcgcgatggactctgccacacattcccccagcggggtgagaacgaggggcgggcgaccacaagggtcgcccctacggatggaggagaggacggggcggtgcgctgaggtgcagaacgtcacaaaataggtgccgcccgcgccgtagtcccacccccgcaggcgggggttcttccgctccggcctatcgggcgtcactgcggcccaccagatagtcgatcgttaccccaaaataatccgccatgcggatcagcgtgctgacggaggcctcccgttcgccattctcatagcgctgataggtgcgaggagtaattttaacggctttggcagccaccgtctgtgagacctttttttggttgcgcagggtcaaaagacgctctgcaaaggttgccataagaacctccttgacaacgaacgaatggtcgttatataataccactaaagacgaacgaatggtcgttaagggggtaattttatgctcgacattctagacgttctctacaactatatccaggaaaaccggattgcgtattatctgaacggcgacccggaatactgtctggccgggcggcggatggacgaggcggaggagtggctggaggccaacctgccgccggaggccagggcgcggctggagcgtctggcagcggcccgcgccgagcgggacttccggtatgagcgggcgctgttccgctgcgggctgggcctggggctggagctggccgggtcaggccggctccccggatagggaccacttgttggccccggtgatcttcacgtccacaaactggccgatcagaccctcgtccccggtcaggcgcaccagccggttgccgggggtgcgggcggtgaggcccttgccgtccttcccgtccaccaggcagcggacggtttttccgatgtaggcggcgtgcttttcctcggaaatctggtcctgccgctccaccagccgctggaagtgggccgccttctccgccttggggatgggatcgtccattttggcggcgggggtgccctcccggggggagaagatgaaggtgaacagcgcgtcgaagcgcaccgcgtcgatgagggtcatggtgtcctcgaactcctcggcggtctcgccggggaagcccacgatcacgtcggaggtgatcaccacgtcggggatggcctggcgcaggcggcgcaccttgtccaggtagcccgcccggtcgtacacccggttcatggccttcagaatccggtcgttccccgcctggaagggcaggtggaagcagggggcgatcttgggggaggacgccatggtgtcgaagagcttctgggaggcgtccttggggtggctggtcatgaagcggagcaggaagtccccggggagctccgcggccgccttgagcagatccgcaaaatccatgggctcgtccagatccttgccgtaggagttgacgttctggcccagaagggtgatgtccttgtacccctcggccaccaggccgcggatctcgtccaggatgatctccggcctccgggagcgctcccgcccccggacgtagggcacgatgcagtaggtgcagaagttgttgcagccgtacatgatgctcacccacgccttcaccccctcctggcgcaccagggggatgccctcggcgatggagccgggctcgtcggcgatgtcgaagatgcgcccccggcgggtcacaaggcggtagagcagctccgggaaccgccacagggcgtgggggccgaagaccagatccacctgccggtaggagtccttgatcttctgcgccatgtggggctcctgggccatgcagccgcacacgcagatgagctggccgggcttgacccgcttggtgtgcaccagcgcgcccacgttgcccagcacccgcatctcggcgtgctcccggatggcgcaggtgttgatgacaatcaggtcggcctccgcctcgctctgggtgaactggtaccccatctcgctgaggtagccccgcagccgctccgagtcggcctcgttctgctggcagccgtaggtgtccacaaaggccaggggcgcggacggccgggcggcgaaccgctcgtggagcttctggcagaaatcccgctggcggtccacgtccgcgggggaaattcgggtggtctgtcgattcaagctggttcctccaaaaagagtatttcaatctcaaaatcatatcacttttcctgtcgaaacacaagcggaaaccccttttcgttgacggaaactttctgggagtatataatagaaaaaaccaggcaagagagagaggcggggccatgaaaacgctggtcatcgagcgggaggctgtaaagaacaacatcggcgtcatcaaggagcgggcgggcgaggccgtgatctacgcggtgctcaccggcgacggccagggggccgggctggtggagctggcccggctgctgcgggaggagggcatcggccgcttcgccgtcagcgagcccgccgaggccgccgccctgcgcagggcgggctttgtggaggaggagattctgatgctccgccccaccgtggaccgggcggagctggagcagctcatcgatctgaacgtggtgtgcactgtgggctcggcggacacgggcatggccctcaacggcgcggcggaggcccgctccaccgtggtggaggcccacatccagatcgacaccggcatgggcttcggcggcttcctggccgacgagccggagaagatcctctcggtctaccgcaacctgcccaatgtggccgtgtcgggcatctgcacccagctccacgcccggaaaaagggcggagaggatctggccgcccggctggggcagttccaccgggtggtggaggccatccgggccgcgggctttgagacgggggttgtccacgccgccgggtcctacgccctgctccactgcgccgacgcccggctggacggggtgcgggcgggctccgccctgctgggccgctgccgccgcgtccacggcgacgggctgtaccgggtgggttacggcgaggtgggcattgaggaggcccgctggctccccaagggacacacggtgggcagcgcccgccccgtcgtcctccggcggcccacccgcgtggcggtgctgcccgtgggctatcagaacggcttcggcgtggcccgcgcccagggcagcggcctgggcgccctgctgcggcgctggctggccgcccggcggcgcaccgtccgcgtcaacggccagcgggcccgcatcctgggggccatcggtgccattgagaccgtggtggacgtcaccgacctcaagtgctccgccggcgatccggcggtgttcgacatcgaccccctgtacgcacgggggtttgtgcgggagtaccggtagcccggccgccctggggtgccggcccctgcaacaaacaaagagaagggaatttgagcgatgcgcgcagttgttaccagagtgaagagtgcctccgtcaccattgacggccgggtgaacggcgagatcggccaggggctgctggtgctgctgggggtgggccccagcgacaccgaggcccaggcggtgaagctggccgacaaggtgtgcggcctgcggatttttgaggacgagaacgagaagatgaacctgaacctggaggcggtggggggcgcgctgctggtggtgagccagttcaccctctatgccgataccaagtcccgccgccccggcttcaccggggccgccaagccgccggtggccatccccctctatgagaaatttatggccgagtgcgccgggcggggcttccgggtggagcacggcgagttcggcgccgacatgcaggtgtattcgcagaacgacgggcctgtgaccattctgctggacaccgaccagatgtagggccgaactcgccccgcgcccctggcgcgtccgagcgttttggcggagccaaaacctcaatgccggggcggattcactccgccccggcagataaaaagggaaccggggtccccgcggggcgggagccccgtggggtgttcggcgcggacatgcaggtgtactcgcagaacgacgggccagtgaccattctgctggacaccgaccagatgtagggccgaacgcgccccgcgcccccggcgcgtccgagcgttttggcggagccaaaacctcgatgccgaggcggattcactccgccccggcagataaaaagggaaccggggtccccgcggggcgggagccccgtggggtgttcggcgcggatatgcaggtgtattcgcagaacgacgggccagtgaccactctgctggacaccgaccagatgtagggccgaacgcgccccggcgtttgcgggcggccacaagggccgcccctaccgggcggaatgtctcctgatactcctgatatgacatcgtatttggcggaattcgtaggggcggcccttgtggccgcccacggaggcgcaggcacagacaaccattgatgaggtgaaaaaggatgcagatcaaagtgatgcaggtgggccagctgggcaccaactgctatttgctggaggatgaggagacccgtaccgccgccgtggtggatcccggcggggagggggcgcgtatcctggcccagctgaaggcggacgggatggagctcaagctcatcctgctgacccacgcccacttcgaccacaccggcggcgtggccgagctgtgcgccgccctgcccggggtgccggtgtacctccacccggccgacgcggccctggtggggggcgacgtgttccccgccgtcggcgcggagacgacgccctatcaggacggggacgtggtgaagctggggaagatggatattgaggtgctccacacccccggccacacccccggcggggtgacgctgaaggtgggggacgtgctcctcaccggcgacaccctgttccagggctccatgggccgcaccgacttcgagggcggctcctacgcggagattatggcctccctggggcggctgggccgcctctccggcgactaccacgtgcttcccggccacatgggggcctccaccctggagcaggagcgcaagaccaactattacctgcgggaggccatggagggataaggcggaaggccgccgcccccggagaaaggacacggcccatgaagctgtatttacacggacacgactacaaatacgccgccgagcagatgctgctgacgctgttccccgcccagcggccggggtatcccgccgggcccccggcgccgggggaggacgcgctggtgctctccctgcaccggggggcggtctgggccaccgccacggcggcgctgagctatgggggacgggaataccgggccgcccgccgatgccggacggcggagctgaccgacccgctgtccaccgaccgggcgctccagcggattttgaagctggccttctacgacgcgggcaccgccgcccggggcggcgagcccccctggggggcgctgaccggggtgcggccggtgaagatccccaccaaggccatgctggccggggccagcccggcccaggcggagcggctgctgcgggacacctaccgggtgacggagggacggcggcggctggccatggactgcgccggggccagcctggcggccctgcgcagcctggcccccggcgaggtctccctctacgtgggcatccccttctgccccacccggtgcgcctactgctccttcgtctccgccgacgtggggcgggccctcaagctcattgaccccttcctggacgccctgtgccgggagctggccgccacgggggccatgctggcggacgcggggctgcgggtgcgcaccgtctacttcggcggcggaacccccaccaccctctccgccccccagctcgaccggctcatgggggagctggcggagcacatcgacctgtcgggctgcaccgagtacacggtggaggccgggcggccggacaccatcacggcggagaagctggcggtgctggcccgccgggggtgctcgcgggtgtcggtgaacccccagaccatgcaggacgcggtgctggagcggatgggccgggcccaccgggcggacgacatcctccgggcctacgccctggcccgggagagcggcatcggctgcatcaacatggatctcatcgccgggctgcccggcgacagcgcggcgggcttccgcgcctccctggagcaggtgctggccctggggccggagaacgtgacggtgcacaccctggccctgaaaaagggctcccggctgatggaggaggggggcggcctgccctccggcgcggcggtggcggatatgctggatttcgcctgggccgccctgcgggcggccgggcagaggccctactacctctaccgccagaagtacatgtccggctcctttgagaacgtgggctggtgccggcccggcgccgagagcctctacaacatctgcatgatggaggagctgcacaccatagtctccctggggggcggcggagtgaccaagctggtcgaccgcgccaccgggtacatcgagcgcctagccaacgccaaatacccccaggagtacatccagaagatcgacgctatctgcgcggacaagggcagggtggcccaattttacgccgcgcacggaaggtaaaggagggaagacatgccctatcagctcagtgagatcaacgaaaaaatccggcgggacccggccgcctttctggccgagtgtgacgcccactaccaggagcgcatccacgccgccgtggacaagatcctggcgcggatgaaggagagccccatcgtgcttctgtccggcccctctggctcgggcaagaccaccacggccatgaaggtggagcgggagctggagcgccggggggtcaacgcccacacggtgtccatggacaactacttcaagaccctcaaccgcaggaccgccccccgcacgccggagggggacatcgactacgagtccccgaaactgctggacatggagctgctggacgagacctttgaccggctgtcccggggggaggaggtcatcgtcccccacttcgagttcgcccgccagatgcgcaacgacagccggggcacccccctgcggctggggaaggacgagatcgccatcttcgagggcatccacgccctcaacgacgacattgccggccgccacccggaggccacgggcatgtatatctccgcccgctccaacatcctggagggagagcagctgcgcttcaagggcacctggatgcgcatctcccgccgcgccgtgcgggactacaatttccgcgggacagacctgttggaaacgctgctgatgtggtataatgtccgccggggggagaaaaagtatatctcgccctacaagggccgcgcccatgtgatcatcgactcctccctgcgctatgaggtgccggtctttgcccattacgccgacgccctgcgggcggcggtggagcaggtgccccccgacaacgagcgctggcaggagtaccacgatctggtggacgccttccggtattttgagccggtggatcccgccctggtggcccccgactccctgctgcgggagttcatcggcggggggagctaccactactgaccggcggggcggcacataggccgccctctgtgccgtatcagaaggccacccgtaggggcgcacctgcgtgtgcgcccgtcaggcggccgcgggccctgcggattgtatgggcggcgcggcggggtagggccgcgatacatcgcggccgtgtcccagtccgccgtccgtatgtcccgcccaaaaccctgttaatcacataggaaagaaggaacgaaaactatgtccgattgtacgcacgactgctcctcctgcggcgagagctgcggggagcgcaccgcgccccaggacttccgcgccccggccaacggcctgtcccacatcgggaaggtcatcgccgtggtcagcggcaagggcggcgtgggcaagagcctggtcacctcctctctggcggtggccatgcgccgcatgggcaagaaggtgggcgtcctggacgccgacatcaccggcccctccatccccgccgccttcggcgtccacaccaaggccgagggcagcgagctgggtatctacccggcggagaccaaaaccggcattgagatcatgagcctcaacctgctcaccgagaacgagaccgacccggtggtatggcgcggcccggtgatcgccggggcggtgaagcagttctggaccgacgtcatctggggcgacgtggactacctgtttgtggatatgccccccggaaccggcgacgtgcccctgacggtgttccagtccctgccggtggacggcatcgtggtggtcaccaccccccaggatctggtgagcatgatcgtcaccaaggccgtcaagatggccgagatgatgcacatccccgttctgggcctggtggagaactacagctacttccgctgccccgactgcggcaaggagcacgccatcttcggcgagagccacatcgagcgggtggccgccgctctgggcctgaaggtgctggcccgcctgcccattgatccggccgtggccgccgcctgcgacgcgggccggattgaggagctagagcccaactatctgaccgccgtggccgaactgctggcggagtaagcgggtcattcctttacaaaatattcatatccggttcaaaaggggttcacagggatggaataggataacagcgtggtcagagatgaccacgccccctctctttcctctcttctttcaattacgaaggcacaggcccgcgaaaggcggcgggcctgtgttttcgcgtatatggagcgtgagacgatgaaaatccggttggagccggtgaccgtggcttccagggccgctgtggagcggctggagacggcccccggacaggagggctttgtggagagcgtggcggagtgcctggccgaggcggaccggcggcggtgctggcggcccgtgggggtctatgatggggatgccctcataggcttcgccatgtacggctttttctgggagtacctgccctttggacggctgtggctggaccggctgctgatcgaccgccgctttcagggccgggggtacggccgggccgcgctggccgccctgctggagcggctggagcgggagtaccacaaaaagcggatctacctcagcgtggtggaggccaaccggccggctgcggcgctgtacgagtccttcggcttccgctttaccggcgagcgggacacccacggcgaacgggtgatgtgcctgcgcacccgctgaaccgggcaaaagcgcccgcccccttttgggggcgggcgcttgcgttagggaaacacggcctggacaagcaccatatacaaaatggtgcctccgaagatgctcagcagggtattgctgcgccacaggtgaaggatcaccaccgccgccacggacacgagctggggcacccagccgccgggggcggcaaaggacacgccccggagacagtatacgatgagcatggcgatgatggccggtggcaaaacccggcccaggtagaggaccagcttggggggcgactccccccggtcaaagagaaggaagggcagggcgcgggtcagaaaggtgataatggccatgaccgcgatggcggcgacggcccctgcggtgctcagcatgtctcttcctccttctcgtccagcctgtcccgcaggaccagcaggcacagcacaatcacgcccagcgagatgagcagcatctgatcctggccgaagaagtggcccaggacaatcagaaacagcaccgtcaccccggcccccagaacggcgggcaggtgcctccggtagctcctccactggtccacggcgataaccacgaacagggcggtcatggcgaagtccaccccctcggtgctgaaggggatcagcgccccggccactgcgccgatgaccgagcccagaatccagtagctctggtccagcagggcgatggcaaaatagaaattccgggggtccacccccaccggggcccgggctgaggacagcagggcataggtttcgtcggtgagggagaagatcatatagagcttgcggggacccatgccacggaacttctccagcatggacagaccgtataccaggtgccggaagttgatgagcagcgtcatgaccgccaccgtgcccagggaggcggcggcgcccagcagggtcacccccaggtactgcccggaaccggcgtagatggtcaggctcatgaagaaagcccagatgaagttgtatccaatctcctggagcatcagcccgaaggcgatgccgatggccaggtagcccatcagcaccggcaccgtcaccgggaatgccgcggagagcgctttgcggtccatacgatacaccccttttgccaaacagtggagtctctattttacacactttagcatggaaaagcaagggggatggcggatttttggcgcttccgtccacagcggaggttgttttttgcccacaatccggtataatggatgcacaaacagatggaggacacccatgaaaaagctgctctttctctacaatacccacgcgggcaagggcctgctgaaaaacaggctggccgcggtgcaggacgcgctggcggcggccgggtgggacgtgaccatccaccccactcagggggccggggacgccacggcggtggccgccgcccgggccggggagtttgaccgcattgtctgctccggcggcgacggcaccctccacgaggtggtggccgggctgatgggcctggagaaccggccggaggtgggctacatccccgccggtacaaccaacgactttgccaaaaacctctccctcccacgggggatggaggccatggccagggtggccgccgccggtgtgcccaggccggtggacatcggctccttcaacgaccgctatttcatctatgtggccgccttcggggcctttaccgacgtggcttacagcacgccccagccggtgaaaaatatcttcggccacctggcttacgtactggagggggccacccgcctggggtccatccaggcctaccccctcaccgtggagcacgacggcggcgtggaggagggcggcttctgctacggcatggtgagcaacaccgtgtccgtggggggcttcaagggcatgcccgccgagcccgtccgcctggacgacgggctctttgaggtggtgctggtgcgccagccccagaatcccctccagctccaggcggtgatcaaggcgctgctcaccatgtctcccgacgagggagggctggtatccagcttccgcaccagccgcctccgggtcgcctgcggccaggagctgccctggactctggacggcgagttcggcggcgcacccgccgtcgccgagatcgtcaaccgccagaaagcggtgaccatcgtctacggcaagtaggggcggcccttgtggccgcccggttgggccgggactctggcggagtgcggttaccgcgggcgggtgtgggcacccgcccctacgggtctgcggcaagggaagtatttcccgcaaaatgtaggggtcgatgcctacatcggcccgctgagccgaatttggcggtttttccgctgcccggcccgttggatactttgaagcgagaaggaacatacatgaattacgaagcaggaagttatgatattgccgtcatcggcgcggggcacgcaggcatcgaggccgccctggccgccgcgcggctggggttgaacaccctgtgcttcaccgtcaatctggacgcggtgggcaacatgccgtgcaacccggccatcggcggcacgggcaagggccacctggtgcgggagctggatgccctggggggcgagatggcaaaggccgccgaccgggcgtgcatccagtaccggctgctcaaccggggcaagggcccggcggtgtggtccctccgggcccaggccgaccggcggagataccaggagatcatgaagcacaccctggaacagcaggagcgcctgtgggtgaagcaggcggaggtcaccgacatctgtgccgaaggcggccgggtcaccgccgtgcgcaccgcctacggggcggtgtaccgggtccgggccgtggtggtggcgtcgggcacctacctggggggccgcaccatcgtgggggatgtgacccgcccctccggccccgacggcctggccgccgccctccccctgaccgagagcctgaaaaggctgggcctgggcctgcggcggttcaagacgggtacgcccccccgggtgaacgcccgcagcgtggatttctcccagatggaggtacagccgggggacgagcgggtgctccccttctcctttgagacggcggagccgccggagaaccgggcggtgtgctggctgacctacaccaatgccgccacccacgccgttatccgggccaacctggaccgctcccccctgttctccggggtgatcgagggcatcgggccccggtactgcccctccatcgaggacaaggtggtgcgctttgccgacaaggagcggcaccagctctttgtggagcccatggggctgaacaccgaagagctctacatccagggcctgtcctcttccctgccggaggacgtgcaggtgcagatgctccacaccattcccggcctggagcgggcggagatgacccgcccggcctacgccatcgaatacgactgcgtggatcccaccgagctgctccccaccctggagcacaagcgggtggcgggcctctatggggccgggcagttcaacggctcctccggctacgaggaggccgccgtccagggcttcgtggccggggtgaatgccgccctgaagcttctgaaccgggagcccctcattctgcggcgggaccaggggtacatcggggtgctcatcgacgatctggtgaccaagggcaccaatgagccttaccgcatgatgacctcccgcaccgagtaccgcctgctccaccggcaggacaacgccgaccggcggctgtgccccgtggggcacgccattggcctgatcagcggcgagcggtatcagcgggtggtggacaagtacgccgccgtggaccgggagatcaagcgcctggagcacaccggcaccgcggagggccgcctgtgcgacctgctccgccggccggagaacacctatgagagtctggccggggcggatcaggaccggcggccgctgcccaccgccgtcaccgaggcggtggagatcgccgtgaaataccagggctacatcgaccgccagctccgccaggtggccgagcagcggaagatggaaaaccggcccctcccccccgatctggactacctgtccctgcggggcctgcgcaccgaggcccggcagaagctggacaagatccgccccctcaatctggggcaggcctcccgcatctcgggcgtctccccggcggacatcgccgcgctcatgatccatctggagcggccccagggcggagagggggcgggcccctgccccgcaaaatcccaggaaaaggagacgctatgaaggaaaagattgtgctgggcctgtccggcggggtggactccgccgtggcggcccggctcttacaggagcggtatgaggtcaccggcctctatctggacatcggcctaggcggcacgggggcggcggacgccgccgccgtggcggagcggctgggcattcccttcgagacggccgacatccgggccgagctggagcgggaggtgtgcgccccctttgccgccgactaccgggcgggccgcacccccctgccctgcgcccgctgcaatccggcggtgaagttccccgcgctctttgccctggccggccgcatcggggcccggtatgtatccaccgggcactacgcccgtgtggaaaacggggtgctgaaaaagggcatgcccgccaacgaccagtcctatatgctggcccggctgacgcgggaacaattacagaaggtaatatttccgctgggagattacgaaaaaaaccaggtgcgcgccctggcccggggcttcggcatcccggtggcggacaaaccggactccatggagatctgctttatccccgacggggactacgccgcctggctggagaggcgcgggttttccacaccggaggggaactttgtggataaagagggaaaggtgctgggccgccaccggggcatccactgctacactctgggccagggccggggcctgggggtatcggggccccaccggtactatgtgaccgccctgcggccggacaccaacgaggtggtgctctccgacggctccgacctgggccgggatgaggtgcgggggacggagcccaactggctggccgtggatagcctaaccggccctatggaggtcacggtgcggctgcgccactccaagacccagctggcggccaccctggagccggagggggacggcgtgcttctgcggatgcacacccccgcccgcgcccccacccccggccagctggcggtgttctacgacggcgacgccgtggtgggctcggcctggattgtatgagagagaaagagaggacgatggacatgaaaaagctacttggtttggccctggcgtgcgccctgctcctgacgggctgcggcgcccggggcggagacaagggggaggagctgggggacaacaccatccgccccctggagctcaccgaggaggaggcggccctgctgaagctggtggggggctccgacgcggagtatggcctgtttgagtgcgcggccggcgagggtgtgagcgactgcaccgtggaggtactgtcctgggaggacggggcctggcagaccgtggcggaggggggcgtgtccatcagcgccgccgggacgcggcggctgggggtcgtcctcagcggggataagatcaccgtaaatgtccaggacggtggcacccaatacagctacgccccccggctggacgggatggaccgcggcctggagacaggccgggcctcggtctggctggaggaagatcaggccatgaccataggggagcgcacaccgctctatctggagatctatgatgacggggagggcgtgggaattcccccactgcccggcgggttctccgacttggccaatctcaaccagtacgatcgggcttacgctgtggctgtcaccctgaagggctagaggcgggccgtttcagcaccggcgtaggggcggcccttgtggccgcccggcccctatggatggcaattgtccgcccctatacaaaaacagcgggtattctgtctctggcagaatacccgctgtttttattttacctccaggccggagagataccgccgggtcaggtcaaaggcgtgggaggcggacacgtggcgtacccgctcccggcccagaccctgctggattttccgcacccaggtgccgtccggcgcggccagggccaggtagaccagtcccaccgggttgccccgctcgtcgggatcgggcccggccacgccggtggaggccaccgccagatcgcaccccagtacccgccgggctccctcggccatggcgcgggccaccggctcgctcaccgccccgaactcgtccagcagcgcctgctccacccccaggacggtgtgcttcacctcggtggcgtagctcaccacgccgccgcggaacacggcggataccccggacaaatcggtcatgcgcttggcgatcagcccgccggtgcagctctcggcgcagcccagggtgaggcccttttccttcagaagctggaacaccgccgcctccagggagggtacgtcggcgccgtagatgagggggccgaaccgggcccgcaggcgctcctccaccggggcgatcagggcccgggcagcctcctcgtccgccgctttggcggtgatgcgcagctcacactccccctccttggcatagggggccagggtggggttggtcatggcctccatctcctcccggagctgggcctccatggaggactccccgatgccgaagagcttgagcgtccgggagacaatgaccccgtcggccaggctcttcaggtaggggatcacccggtgggtgaacatggccctgcactcccggggcgggccggggagcatgatgacccgcaccccgtccgcctcgaaggccacgccgggggcggtgccccagtcgttgtccagcaccgtgcacccctcgggcagcatggcctgctggtagttgttctccgtcatggggcggccggcgtggagccgctcaaagtaggcctcgatgcggcgggcggagggcgcgtggaacaccagctttttgccgaagcactcggccagcacgtttttggtcagatcgtcgcaggtggggcccaggccgccggtggtaatgagaatgtccgcccggcttttggccagctccaccgcggcccgcagccgctgggggttgtcgcccaccaccgtgtggtagtagacgttgatgcccagggccgacaggccctgggagagcatctgggcgtcggtgttggcgatgttgcccagcagcagctccgtaccgaccgcgatcagctccgcagtgtgagacataaaaaagacctcctgtcgccaacaccggcatcggcggcgggtgccgccgcaaatgcgcagcgcagcatttccacagggcggattcactccgcccgaggatgtagtaattgggagttctcctccgtagggggacaacccgtaggggcggcctttatggccgcccgccgtttcccgccgccgtggtcagacctgaacccgctcgatgccgtccacggcggcctttaccaggccctccacgtccagcgcggcctcggcggcctccagctcccccagcacggggcgcagccggggatggcggggagtgaagacggtgcagcagtcctcatagggcaggatggaggtctcaaaggtgttgatcttccgggcgatgcggacaatctcctccttgtccatgcccaccaccggccgcaggatgggcagggtggtgacggcagtggtggcccgcatggcctccatggtctggctggccacctggcccaggcactcgccggtgacgatggccccggcgccgcaccgctgggccaccgcctcggcgatgcgcatcatgaaccgccgcatgagcacggtgaacagctcctccgggcacttgcggcgcagctcctcctggatggcggtgaagggcaccacgtggacggtgagccgtccgcaccagggggtgagcagcttggccagggtgagcaccttctgcttggcctcctcggaggtgtaggggtaggagaagaagtgcaccatttccagggcaatgccccgcttggcgatcatccaggaggccacgggggagtcgatgccgccggaaagcaggctcaccgccctgcctcccacgcccacgggcaggccgccggctcccggctccgggtcggcgtggacgtaggcggcgtagtcccgcacctccaggtagacggtcagctccgggtggtgcacgtccacggtcaggttggggtacttctcgtccagctcgccgcccacgtactgggagagctggatggaggtcatggggaagctcttgtccgcccgcttggactccaccttgaaggtcttggcggccgccagccggtcccccaggtactccacggcggtctggagcatggcgtccttgtccttcgcgcaggcccgggcccgggacaggccaaccacgccgaagagcttggtcatggcctcccacgcgccgtccagatcgcagtcctcgctctgcggctccacatacatggtagactgcttggtgtataccttgaatttgccgtgggcctggaggcggcggcgggcgttagccacgagacggtcctcaaaggtacgccggttgagccccttaagcaccagctcccctagttttaacagaataatctcgttcatgtagtctggattcctttcccaaagtttcactattatatccaatttgctttttgttgtccagaggggcgggcctgtctccacccgcgtccgggggcctaccgccgcaggtactccggcgggcggtactggagggcttcggccaggtgctccacggcgacggcccccgccccgtccagatcggcgatggtgcgggccacacggaggatgcggtcgtagctgcgggcggtgaggcccatccggtcgaaggcccccttcatcacggcgcggcaggcgtcgtccagggcgcagaagcgggagagctccgccgggcccatctggtcgttgcaggccgggccgccggggccgaagcgggcggcctgcaccgcccgggccccgtccacccgggccttgatggcggcggagggctccgccggggtccggcgggagagcgcgtcaaagtccagtggcggcacctccacgaacaggtcgatgcggtccagcaggggcccggacaggcggctgaggtacttctccaccgcctggggcgagcagcggcagcggtccgaatagccgtaccagccgcacttgcagggattcatggcgcacaccagcatgaagcgggcggggaacaccgccgtgcccgacacccggctgatctgcacccgcccgtcctccagaggctggcgcagggtctccagggcctccttggagaactcgggcagctcgtccagaaagagcaccccgttgtgggccagggagatctctcccggccggggactggagccgcctccggccatgcccatggcggacaccgtgtggtggggggagcggaagggccgccgcaccagcagggggtgctcagaggtggtgaggcccaggacggagtggatctccgtggcctccagggcctcccgccgggtcagatcagggaggatggagggcaggcggcgggccagcatggacttgcccgatccgggcgggcccaccatgcagaggttgtggccgccggcggcggcgatctccagggcgcgcttcacgttttcctgccccttcacgtcggcaaagtcggggcaggcaaagtcctccggccccggcgtccaggccgccgccggctccagaggggcctcccccctcagatgggccgccaactgccccacgctctccaccgggtagacctccagcccgccggccagagtggcctcggcggcggagggggcggggacgtacagccgcttgatgcccgccctccgggcggccagggccatgggcagcatgcccaccaccggccgcagggagccggacaaagacagctcccccacgtaggcgctgtccggcccgtccagcctgagctgtcccccggcggccagaatacccgccagaatgggcaaatcgtacaccgtgccccccttgcgctggttggcgggagccaggttgaccgtgatgcgggacaccgggaaggtgaagccgcagtttttaatggcggcgcgcacccggtcccgggcctccttcaccgccgcgtcaggcaggcccacgatctcaaaggcgggcagaccggccgacaggtcgcactctgcccgcacctcatagccggagatcccgctcagccccagggagcgcacttcacagagcatgggtgccgcctcctttccctttcgtcatgttgcatccattatagcataccggacccgccgccgaaagggtgaaaagcggccctgtaccggcggagggaaaggggagaacatgatacggcaaaggactgcttttaaaactgcatattttagcatgctcagtttagttagttatatataactaaataatttttctcaaaggagaacggaaaaaatccaattatttcttctaattcaggaacaaaaagaaaaataataattcagagtaagatttgatttacaaacgtcaatgaaggtgataaaatgtatgcgccccggggggacaggctccgcccggaggcagctgtaatcagccagggtaatgggaatcgggcccggtcagtccgggggatggacggggacggattcccattgccctggaaccatgaacaaggaggaatcgtttctatggcgagaaagctgaaaaccatggacggcaacacggcggcagcgcacgtgtcctacgccttcaccgaggtggcgggcatctaccccatcaccccgtccagccccatggccgacaatgtggaccagtgggccgcccagggccgcaagaatatcttcggcaccaccgtcaatgtcatcgagatgcagtccgaggccggcgccgccggtacggtccacggctctctggccgcgggcgcgctgaccaccacctacaccgcctcccagggcctgctgctgatgattcccaacatgtacaagctggccggtgagctgatgcccaccgtgtttcacgtgtccgcccgtaccgtggccacccacgcgctgaacatcttcggcgaccattccgacgtcatggcctgccgccagaccggctttgccatgctgtgcgagtccaacccccaggaggtcatggacctgggcgccgtggcccacctggcagccatcaagggccgcgtcccctttatcaacttctttgacggcttccgcacctcccacgagatccagaagatcgccatctgggacaacgaggatctggccgacatggtggacatggacgccgtggaggccttccgcaagcgcgccctcaaccccgagcgccccgtgatgcgcggctcccacgagaacggcgatattttcttccagcaccgcgaggccgccaacaagtactatgacgccctccccgagatcgtggaggagtacatgggcaaggtcaatgccaagctgggcaccaactaccagctcttcaactactatggcgcgcccgacgccgaccgggtcatcatcgccatgggctccatctgcgacgtggccgaggaggtcatcgactacctgaacgcccacggcgagaaggtgggcctggtgaaggtccgtctgtaccggcccttccgcgccgacaagctgctggcggccatccccgccaccgccaccaagatcgccgtgctcgaccgcaccaaggagcccggcgccctgggtgatcccctgtacctggacgtggtcaccgccttcgccaacgccggccggcaggccaccatcatcggcggccgctacggcctgggctccaaggacaccccgcccagcaacgtgttcgccgtgtatgaggagctgaccaagtccgcgcccaagcgccagttcaccgtgggcatcgtggacgacgtgacccacacctccctggaggagaagccctcccccaacaccgcggcccccggcaccatcgagtgcaagttctggggcctgggcggcgacggcaccgtgggcgccaacaagaactccatcaagatcatcggcgaccacaccgacaagtacgtgcaggcctacttccagtacgactccaagaagaccggcggcgtaaccatcagccacctgcgcttcggcgacgagcccatccgcgccccctactacatcaacaaggctgactttgtcgcctgccatgtgcccgcctacatcgtcaagggcttccccatggtccgcgacgtgaaggacggcggcgtgttcctcatcaactgccagtggtctgacgaggagctggatcaccacatgcccgccgtggccaagcgctacatcgccgagcacaacatccaggtctacaccattaacgccatcgacctggccatcgagatcggcatgggcaagcgcaccaacaccatcctccagtccgccttcttcaagctggccaaggtcatgcccgaggcggaggccatcggctacatgaaggacgccgccacccactcctacctgaagaagggccaggacgtggtggatatgaaccacaaggccatcgacatgggcgccaccgcgttccacaagtttgaggtgcccgcctcctggaaggacgccaaggacgagaccgtggccgagcacgtggagggcaacgccgccaccgtgaagatggtcaaggagatcatggagcccgtgggccgcatggacggcgacagcctgcccgtctccgcctttgccaacggccacgaggacggcaccttctgccagggcgcttccgcctatgagaagcgcggcgtggccgtcagcgtgcccgagtgggatcagaccaagtgcatccagtgcaaccagtgctcctatgtctgcccccacgccaccatccggccctatgccctcactgaggaggaggccaagaacgcccccgctcaggccaagatcgtggacatcaaggccggcaagggcaagggtgtatacaagtttgccattgccatttccccgctggactgcatgggctgctccgtgtgtgtgagcacctgccccgtcaaggccctgaccatgaagccccaggagtcccaggctgccgagcaggaggtctttgactacatggtggccaaggtggcccccaaggccgacgtggaggacaccaataccgtcaagggcagccagttcaagcagcccctgctggagttctccggctcctgcgccggctgcgccgagaccgcctatgcccgcctggtcacccaggtctgcggcgaccgtatgtatatttccaacgccaccggctgttcctccatctggggcggcccggctgccacctctccctacaccgtcaacaaggagggcaagggtcccgcctgggccaactccctgttcgaggataacgccgagcacggccttggcctgcacctgggccagaaggccatccgcagccgcctggccgacaagacccgcgccctgctggccgtggagtggtgcactccagccattaaggagactgcccagaagtggctggataccatggaggacggcgcggccaacgccgaggccaccaaggcctacatcgccgctctggaggacggcctgtgcacggtggacgagctgctggccagctccaagcccgagatccaggcgtttggcaaagagctgcaggccaagggtgagaagctctgccagtgtgacgcctgcaagctggccgctgagattctccaggagaaggagtatctggttaagaagtccgtgtggatcttcggcggcgacggctgggcttacgacatcggctacggcggcctggatcacgtcatcgcctccggcgaggacgtcaacatcttcgtcttcgataccgaggtctattccaacaccggcggacaggcctccaagtcctccaatatcggccaggtggcccagtttgccgccgccggcaagaaccagcccaagaagagccttgcggagatcgccatgcagtacggctacgtctacgtggcccaggtggccatgggcgccaaccccaaccagactctgaaggccatcaccgaggctgaggcctaccacggcccctccctggtcatcggctacgccccctgtgagatgcactccatcaagggcggtatggccaactgccaggttgagatgaagaaggccgtggagtgcggctactggaacctgttccggttcaaccccgctctgaaggccgagggcaagaacccgttcaccctggactccaaggcccccgccggcggctatcaggagttcctgatgaacgaggcccgctactcctccctgacccgcgccttccccgagcgcgccaaggagctgtttgcccagaacgaagaggccgccaaggagcgctatgagcatctcaccagactggtggagctctacaagtaaacaagctcgcacaagggccccggacgaaaacgtccggggcccgttttatatggcggcctcttcgggggccccgccgacggcggggcggcgttttgcgccgtccaagcgttttgggccgtgggcccaaaaccttgatgccggcggaattcagttccgccggacagataaaataaagatggggtccccggcgggccccggcccggcggggcagagccgccaaggagcgctatgagcatctcaccagactggtggagctctacaagtaaacaagctcgcacaagggccccggacgaaacgtccggggcccgttttatacggcggcctcttcgggggccccgccgacggcggggcggcgctttgcgccgtccaagcgttttgggccgtgggcccaaaaccttgatgccggcggaattcagttccgccggacagataaaataaagatgggggccccggcggggcagagccgacgccctcccacgcggctctctccaccccatgtaaaggcaccctccgggtctcatgacccggagggtgcttgacggcttggactcagccagtcatcttcgcataggggtagatgcgctccatcacgtcgtcaccgtagtgggcgtccatgtactgttcccaggccgcgtcggcgggctctccggcggcccgggcgctgtagcgtgccagggccaggccgctgaccgtcatattgacggacatgaaggcgatgagcagccagaccaccgctttcccggggcgcggtggaatcttggcgatccagcgggccaggatggggtagagcccccggaaccaggccaccgcggcgaagccccagaagaagcagtatagcaggttgatgcgcccgcccaggttgaagggaatagcgctgtagtcccagaacacggtgccgaacaccagctcggtaaagacgctgcacaggtactcatacaggccgcccagcagggtgcccgccacaaagaaaaaggaggccgagcggtcccggtatttgtagaggaacagggtggcggcggccagggccaggccccacacgatgctgaaggggccccacaccacgctgctgcggctcatccaccagcccattttgaggcggcagaagatggtttcggccagatcaccggccactccgccgataaagaacaggagcaggatgctgtaaaagctggccccccgggcaaaggggctgacagtggtcctttcccgccggcgggaaaagaccgcgccggggtgggccttctgaatgcgcccctcggcgcggcggagaatccactccccaagccggacggagagggcggccagacggctgttcaggttctccagcgggggcaggctgctgcggacgccgcagagggtcagcacggtgcccgcgatgtccgccgccagcagggccagcagcacccacagcaggatttctcccaccagcgggggcagccagcggtagagggccaggagcagcgggttgatccactgtacggccgccaggcccagcacgccccacaggaggaaggcgccgacacagatgtagccgtccaggttgccgcgccggttggagtagtcccaccagcgggtgtgggtggccttctccagcaggtgaccggcgatccattccaccaccgtggagcagatagcgctgcccaggaagaggaagaagtagttgccccgcagctcgggcagacccacggtaagcagaacggcagtgatgccgtagcaggcgcacagcgggccgaacagcacgctgcggtccacatagcggtgaaggcggacggcggaaaccgccgtctccagcacccagccgaggaaggaataacagaaaaagagccataggaggggaaacagaggcacaagcatccgcctttcttttcatcaacactggtgggaagagaatctgaggattgtatcttatcgtattttccggtaaaatacaaccgatctctcataagaaaggcaggtaatttggcaatgaacgaagtgttgaaggttttgaaggagcgccggagctgccgcagctaccggccggagcagatcaccgacgaggagttgaacgcagtattggaggcgggcacctatgctcccacggcccggggccagcagtccccgatcatcgtggcagtgcagaatcccgctgtggtggagcagctgcggaagatgaatgccgcagtgctgggcaccccggaggccgaccccttctacggtgcgcccaccgtgctggtggtgctggcggccagggataacaccaaccgggtatatgacggcagctgcgtcatgagcaacctgatgaacgcagctaaggcggtggggctggcctcttgctgggttcaccgggccaaagaggtgtttgactccgaggagggtaaggccctgctccgacagtggggcgtggagggcgactacgagggcatcggccactgtatcctgggctaccgggcggacacggcccctgcacccgccccccgcaaggagcactacatctaccgggtccggtagggaggaaaacaggtgccgcggccgggccgcggaatccgttgcttgtaaaggagagatagagcatgcacacggtaaagagagtctgcacactggtcctgacgggcctgctggccctgcccatggccgcccccgcgggggcagcggccgcatccttctccgacctgccctccagtcactgggcctatatcgccatgacggaggccgcgggctatggcatcctccagggcaccggggccaacaccatgagcccctccgcacccctgacctggccccagttcctggccatggccgcccgggcctttgccccggaggaatatgcccgcagcgccgcttccggcgcggcctgggatcaggcggggctggatgccgcccggagcgccggcctgctggaggggctggacgaggccgcgctgaccggggcggtcacccgccaggatgccgcggtggtgctctgcaacgctctgccggaggaatataccccctccttctgggatcagccgattgatcccacagccctgtcggactgggggcggatggacagcctccgccaggaggcggtggccgagctggcccgccgctgcgtcatgcagggcaaggcggacggctccttcggctatgccgatccccttcagcgctgcgacggcgcggtgctgttgatgcgggtactggagcaggtggacaatagctgccgcggcgagagccagaccgtcacccttcacattctgaacgccgacaccggcgaggccctcctgcccgaccagcaggtggagacggaggtgagtacctacctgtccagcctggcgaacgggctggacgtgggctactacgtctacgactacgaccgggagacggcatcgtataccagcactgcctgcgacagctataccctgtatttccggcccatgaccggggccgagattcaggaggagcagttctgggagaaggtggagcggggcgaggccgcctatgaggactactataagcaggacttctggctcagcttccagggggacaacgcccgcaagcacatccttctcttcggcgacgagagcaagagccgctttgccagccaggaggaggccgccgccgctatgacggccgtcaccgtgccggtgtggcagctctccggcggggagaaggtgtcctccaccctcaccctctccgtccacgccgccctggcggaggacgtgaaggagatcttcaccgagatctacaacgatcccgagcgcttccccatccacgacgtgggcggctacgcctggcggggcgactccgccaccggcgagcacaactgcggcaccgccatcgacatcaacgccaacgagaactaccagatccgcgacggtcaggtgctggccgggagctgctgggagccgggaaccaatccccgctccatctccccccactcctccgtggtgcgcatctttgccgagcacggctggagctggggcggcgacgcctgggcctacagcagcgacgattccgagggctaccacgactatatgcacttctcctacatgggagagtgaccaagcaacccaccccgggcttcggctccggggtgggtttccattatctccctcttgactgaaacaaatgttcgatatataatagagctaaagaaaaaggagagggggcggcagtgtggagctgctggacaagctgaccatcctggccgacgcggccaagtacgacgcggcgtgcacctccagcgggctggatcgggcgggccggcccggcggcctggggagcaccctggccgccggatgctgccactccttctccgccgacggccggtgcatctccctgctcaaggtgctgcttaccaaccggtgcgtctacgactgcgcctactgcgtcaaccgccgctccagcgatgtgcgccgggccgccttcaccccacgggagctggcggagctcaccatcggcttttaccggcgcaactacatcgagggactcttcctctcctccgccgtgtggggcggccccgaccgcaccaccgaggccatgatcgaggccctgcgcctgctgcgggaggagtacggcttccgcggctatatccacgccaaggccatcccgggggccgaccccctcctcacccggcggctgggcctgctggccgaccgcctgtccgtcaacatcgagctgcccagcgaggagagcctgggccgcctggcgcccgacaaggccaaggccgccatcctggcccctatggcccagatccgggatggcattcaggccagccggggggagctggcccggttccgccacgccccccgcttcgccccggcggggcagtccacccagatgatcatcggcgccacgccggagagcgacaggcacatcctcaccctcacccaggctctctacgacaagtacaagctcaagcgggtgttctactccgcctacatgccggtgtcggacagcgcccttctccccgcccggcgggacttcaagccgcccctgctgcgggagcaccggctctaccaggcggactggctgctgcggttctaccacttccgggccgaggagctgctggacgaggcccaccccaacttcaatcccctggtagaccccaagtgctcctgggcgctgagccacccggagttcttcccggtggaggtcaaccgggcggactacgaggccctgttgcgggtgccgggtatcggggtgacctccgcccggcgcatcctggttgcccgccggtgcgcgtccctcacctttgcggggctgaaaaagctgggggtggtgctcaagcgggcccagtatttcctcacctgcggcggcaagtacctggagggcctgcgggtctcccccgacggggtgctccgccacctggtggcccaggagcggcccatgctgacccagggtgcgccggagcagctctccctcttcgagcagacgggttaggaggcggccatggactggacaccggtttcctatgcctacgacggcagctttgccggctttttgacctgtgtatttgccagctacgcccaccgggaggagcccatgagcttttccaccccggaggacgggcggatttccctctggccggagcggacggtggacaccgacgaggcccgcgcccagcgggtgtaccgctccctggcccccaggctggggcaggaggggcggcggctggcggtgtacggctttctcacctgcctggaggagcgggagctccacctgtggcggtttctccgcctggggtacgaccgggggccgtgggtggtgcgggatctcaccgacgaccgggtggcagtgctgacccgcgcggtgggccacctgaccggagaggcccatctgctcaagggcttcacacgcttctccgagcaggagggggtgctggtgggggaaattgcccccaaaaaccgggtgcttcccctcctccgaccctacttctgcgcccgctatccggaggagtccttcgtcctctacgaccgcacccaccgggaggcgctgttttaccggccccggcggtgggccatcgttcccctggaggcgttccgcgccgccgcccccggccgggaggagcgggacttccgccgcctgtggcggcggttttacgacaccatcgccatcgaggggcgggagaacccccggtgccgcatgacccagatgcccaagcggttctggggcactatgacagagtttcaaaacgaaccggaggagcgaaaggagcttgcaccatgaagaacgtgaaaatcattgtgctgcgcaagggattttaccccgatctgatccgggagcacctcaccgagcctccggaggagtgcgtctgcgacttcttccgggagggggatcagttcctctataccgggggcgcggaaatgcccgccggcttctgcccctgggcgtggatcgatctctaccgctcggtgtccgccctgtcctgcggtgcctcctataccccctggcagcggcgggagggggtcaatgtggtgtgctgtaccgacgggctgcgcccggtgaccttcctgttggaggcccaatgagaaagcgccgcccccacaatgcgggggcggcgcttgtcatgtaacggagtgctctgggatgtcctgccagcggatgcgctgggggatggggggcggattgcccttgaagtcccggtcgaaccagcgcggcacgggagtttccgccgaaatggcctggaaaaaggcggtgatctgctccgctgtctcagggatggccgcctccagcagacggttgaggtcggcgttgctctcctgcgccgaggggtggggcgtctccttcagggcgatgcccttggcggagggaatggggagcatgtggctcaccgcaccaatgaccttgccggtcatgcggccgttggagcgggccaggaagccggagaagaaggccatggagcggtaggcccgccgcatctggtcaggggaggcgtggacaaaggcctgggacgccgcctcccagacggcgcggttggccggggcgctgggcagtggggactgctcggcggcattgaggccgtcccgctccatcagcatccggtcatactccccctcaatggccatgtgggagatggggccgtcggcggcccggtcgtccacgtagccgtggcaggcgctgtccagggccaaatggcagaggaagccagctccgtagccggtggacatgggtacgccgtcctcgatagcctggcgcagacgctccaccgcgggcagggcggagcggcggtgcatcttgatcccctcccgccggacggcgttggggcggatgggctggtagaagaacagcgggtcggggcccagacagcccaggtcaaaggcctcccgctcctgctcaatgagttcggacaggccggcgggcaggtccgccagcacccgttggccaaacgtcaggtgcgcgtagtaattgggcatggtatggatcagcgcctccttgcacaacgcggcgatattgccttgctgaccatattatagcacgccagtcaaggggaggaaatggaaaacagcccggcggtgcgcgctccgccgggctgccgtttaaccgcccaggtatgcctttttgacggcctcgtcggccagcagctcccggccggggccggtgagggtgacccgcccggtctccagcacgtagccccggtcggccacgctcagggccatctgggcgttctgctccaccaggagaatcgtggtgcccgcccggtggagctccttgatgatggcgaagatctgctccaccagcaggggggccaggcccatggagggctcgtccagcatgagcagcttggggttggacatgagggcccgccccatggccagcatctgctgctcgccgccggacagggtgcccgccacctgacggcggcgctccttcagccgggggaactgctcgtacacccgctccaggccgggggcgatggtggaggcgggctgggtgaagccgcccatctccaggttctcctccactgtcatctgctgaaagacccggcggccctccggcacctgggccagtccgcggcccaccagcttggaggcggggacgttctggatgggctgccccaggaactcaatggagccggtgcgggtgtggagcagaccggacacggtttgcagtgtggtggtcttgcccgcgccgttggcgccgatgagggtgacaatctccccctcgttgacctgaaaggagatgtccttgacggcgtgaatggcgccgtaatagacgttgatgttcttgacatccagcatcacagccatctctcagccctcctttccgccgcccaggtaggccttgatgacctccgggttgttctgaatttccgtgggggtgcccttggcgatgatctggccgaagttgagcacacagatgccctcgcagatacccataaccaggttcatgtcgtgctcgatgaggagaatggcaatctggaaggtgtcgcggattttgacgatgttctccatcagctccgccgtctccgaggggttcatgcccgccgccggctcgtccagcagaagcagggacgggttggtacccagggcgcggacgatctccagccggcgctgggcgccgtagggcagggagcccgccttgacgcccgccaaatcctgcatgtcaaaaatggagagcagctccagcgcgcgctcatgggcggtcttctcctccttccagtaccggggcaggcggagaatgccgctgaacaggccgcagtggatggaattgtgcatgccgattttgacattgtcctccacgctcaggttgttaaacaggcggatgttctggaaggtacgggcgatgcccgccttgttgacctgcactgtgttcatgttgtgggtgtctactccgtccagcaggacggtgccccgggtgggctggtacaccttggtcagcaggttgaacaccgtggtcttgcccgcgccgttggggccgatcaggccggcgatctcggtgcggccgatggccatgttgaactcgttgacggcggtgaggccgccgaagtcgatgcccaggtgctgggcctccaggatggggctcttatccacgtcccgctctggaatcttgttgacgctgggcaccggaaccagcttagtctcctgtcgttttatgctgctcactgcctgccgcctcctttcaccgccgccgcatggggcgcgtccgcccgctcccggtgaaacagccgggagaaaaagcccttcagggtgggattgttggtggccagcatgaccaggatcagcacaatggcgtacaccagcatgcggtagttggagaactggcgcagggcctcgggcagaatggtgagggccgcggcggcaatgacggagccccacatgttgcccaggccgcccagcaccacgaacaccagaatcagaatggaggtattgaagtcgaacttggtggcggcaaaggtggtctggctgcacccgtacagggtgcccgccgcgcccgccagggcggcggagaccacaaaggcaatcatcttgtacttggtgacgctgatgcccacgctctcggcggcgatgcggttgtcccgggcggccatgacggcccggccggtgcggctgttgaccaggttgaagatgaccaccagggccaccagcaccagtacaaagccggcaataaaggtggagatgcgctgggtgttcatcacgcccatggggccgcggatgagctccaccccgccgtcggccagctcgtttttgttggagaggaagctgaactggaggccgttttcatccacccccaggtagacattggtgatgatgctcttgatgatctcgccaaaagccagagttacaatggccagatagtcgccattgaggcgcagcacggggatgccgatgagaaagcccagcgcggcggcgatgaccgcaccgaataccatggccagggccaggcgcaggggggaaagggtgacggtgctctggagagccagggccagggcagagccggcaaaggctccaatgctcataaagccggcgtggcccaggctcagctcgccggagacgcccaccaccaggttcagggccagcgccatgacgatgtaggcgcagatggggatgagctgcccctccagcatggcgcccacgccggggcccatccgcagggcctgcaccaccacaaaggccgcaatgaccagcgtgtaggtaaacaggctgtttttggtggattttttcatctgtccaagttgtctcatcgcgtccacctcacactttctcacggacggtcttgcccagcaggccggcgggcttcaccagcaggacgatgatcagcacaccgaacacgatggcggtggacagctcggtggagatgtaggcgcgggcaaaggtctcaatgacgcccagcagcaggccgcccagcagggcgccggggatggagccgatgccgccgaacacggcggcggtaaaggccttgatgccgggcatggagccggtggtgggggtcaggctggtgtaggtggacaggaacaggacgcccgcgatggccgccaaagcggagccgatggcaaaggtcatggagatggtgcggttgacgtcgatgcccataagctgggccgccgccttgtcctccgagcaggcccgcatggccttgcccatcttggtgcggccggtaaaggcggtgagggccagcatgatggccacgcacaccaggacggtcacgatggtcagccaggagatggagagctggccgtcaaacagggtcagcttggcggatgggctcaccacgggggtaaataccttggggctggagctccacaggagctgggccgcattctggaggaagtagctcacgccgatggcggtgatgagcaccgccagggaggtggcctgccgcaggggcttgtaggccagccgctcgatggtgatgcccagcacggtgcacaccaccatggccagcaccgtgccagccagggcgggaaccaccagcgcggccaggctgcccggggcgaagagggaggacagcccgttcatgctgaaaaagcagatgtacgcgcccaccatgatgacatcgccgtgggcgaagttgagcatcttggcgatgccgtagaccatggtgtaccccagggcgatgatggcgtagatgctgcccaggctgatcccgttgatcaggtagttgaggaagaccataacacacacctctctgtcatggatgattgcggccgggcaatggcgggccgttgcccggccgcaatcatccatttgttctgtgtaagcagttggcgggagggccgccggccgtgccggcagccctcccggaaccgtgttttgtggacgctgggactggcgatcagtccatgcccacgtaagcgccgttctcgataaccatgcccttggggctcttggatacctcgccggaggcatcccaggtgatgccggcgccgtcgccagtcaggccggtcagggtaatggtggggaaggtggcaatcagggcgtcgcagagctcctcattgctcatgtcgggggtgcagccggcggcctccagggccatcttgtaggcgtagacgcagtcataggcgtcggcggcaaactggttgggggtttcgccgtagagctcctggtacttggtcacgaagttgacggtggcctcgtcggtggcgtcggcgttgaagggggtcagcagcatgacaccctcggctagggaggcgtcaaagccgtccatggtcaggatgccgtccatgccgtccacgccgaagaaggtgggggtgtagcccatggcgtcggcctggctcagaatcagggaggcgggctgatagtagatgggcaggaacaccaggtcggccccggcctgctgggcctgggtgagctgaacggagaagtcggtggcggtgtcggtggtaaaggtggcgtcgcccaccacctccaggcccagggtctcggcctccttcacaaactgttccttaatgccggtggaatacacatcgtcatttttccagatgataaagaccttctcacccaggccctgctcggtgatatactgggcggaggccaggccctggttggggtcggagaagcacatctggtagacgttgtccttgccgctgatgacatcgggggagctgccggagggggtcatggtaaagatgcggtcctcaaaggccagggcggaggtgctgacgccgggctgggaggtgacggagcccagggagatctgcatgccccactccttcagggcgttgtaagcgttgaccgcagtctccgggacgttcacatcgtcctcgtacttcagcgcgaactgaatgtcgccgccggcctctttgatttcatccacggcgatctgggcgccgcgctgggcagccaggccatagatggcggcgtcgccggtcagagggccggtgccgcccagcttgaaggcggagccggtgttctcctggacggcgctggtgttggctgcgtcgggggtctgggctgccccgccgccgtcaccgctgccgccgcagccggccagcagggacacgcagagagtacccgtcagtgcaagagacaggaagcgagtctttttcatagtggtatcctcctttgaagttgttgacaattatattctgtgcgcttgaaattgtcaactagcaaaatacacaagggcggcctgtgagagaccgcccttgtgtaaaatatgaacaaattgtgaaacggacacttaaattaccagcccgccgttgggggccagcacttggccggtaacaaaccgggcggcgtcggaggagagataccagatggcctccgccacgtcctccggggtgccgatggcccccaggggagtctcctccgccagggcggccagggcttcctggtccagatgggcgttcatttccgtggaaataaccccgggagacacgcagttcaccgtgatgcccgaggggcccagctccttggccaaagcccttgtgaggccgatcactgcggcctttgcggcggaataggccacctcgcaggagccgcccacctgcccccacatggaggacacggtgacgatccgccccgccttgcggtggatgaagtggggcagggcggcccggacggcgtgaaacacgccgtccacgttgacggcaaacatccgccgccagtcgtcatcggtcaaatcgccaaacaatttctgctgtgcaatgccggcattgcatatcagaatgtcaagttgacaatatttatccaacacattgtcaaccattcttcccacctggaccggatcggccacgtctgcctgcaccgcccagcccccaatctccgcagccagggcctcggcctgggcctgggaacggtggtagttgataaccaccttacagcccccggcggcaaagcgccgggcggttgccgcgccgatgccccggcttccgccggtgatcaggaccaccttctgctccatcatcctcttcctttcagccagtctatgcacagcggatgccaggccgctgcatgggcgttatagtgggcctcgtcccgggcactctcccggtcggccagccccatggcatggggcccgtcctgaaacaggtgcagctcaaaaggcacctgccgcgcccgcagggcgcgggcatagtccagggtattttccaccggcaccgtggcgtcccccaccgtggcccagagaaaggcgggcgggtggcccgggcccacccggcggtccggccgcagcacctccgccccgcccagggggtccagatagcgggcctcgtgcaccaccggatagcccagtatggccgcgtccggccgcacctgctccggcgtcagccccagccgctcgttcaggaggggctcggcgtacccgccggccaggcagcccgccagatgtcccccggcggaaaagccgcacactgccacccggtcgggccggaagcccagctccggggcgttggcccgcatccaggccagagcggccgccccctccaggaattgcctgggccagagggcgggcagcacactgtaggacagcacaaaggcctgtatccctgcggccagaaaggccagggccaccggctctccctccgccggggcaatgcgctcgtatcccccgccggggaggatcagcaccgcccaccgcgccccgtcgtcggccagcaggccggtgcggccccggcagtatatgtccagccccgtctccggggcgcccccgcccagcgccggatggagctcatccagagagacccgtcggcagagcatgcccgccacccctttccaatccactttgatccgagtataccagccggtttcccctttgaaaaggggaaaatcaaaaaaagtattgacaaatagagcttgtacggatataataatctacgctgtctggacgattagctcagctggtagagcatccgcttgacgtgcgggaggtcacaggttcaagtcctgtatcgtccaccagattagcgggggacatgacccacagaggtcatgtccctccttattgttttgcgtggaaagagccgccccgatgggcggctctttccacgcccgttcacgcgcgccgggcggccatgtccacggccacctccagggcgagggtgatcatctgggtgaaggaggtctggcgctcggtggtggagagggcctcgccggtcagcaggttgtccgaaacggtgcagacggccagagcccgcttgccggcctccgccgcgttgcagtaaagggccgcgctctccatctctacggccagcacgcccagccggccccaggccagagtatcctccgtccggcggtaaaagacatcggagctgagcaggttgcccacggcggtctccacgcccaggcggcgggccgccgacacggcgctctccagcagcgtaaagtccgcgatgggagagaaggtgccgtccagcccgtactgcctggggtagttggagtcggtgcaggcggcctggccgagcaccacatcccgcagcttcagccggggagagatggagcccacgctgcccacgcggatgatgttgtccacgtcgtaggtgtgaaacagctcgtaagagtagatgcccatggagggcatgcccatgcctgaggccatgacggacacaggcgtgtcccggtaggtaccggtatagccctgtacgccccggacattgttgaccagcttggcgccgtcgagaaaatgctccgcgatgaatttggcccgcagcgggtctccgggcatcagtacggtctttgcaaacgccccctgggcggcctcattgtgtggtgtacccatcgttcttcccccttatttctggtggttctattataagcggcctagcccttctttgcaaggcggaggaggaagctcagttgacattggggcgggatatcattaaaataagagggccatgccggcggcgcggcgcacggctcgaccggatatgacaatcgacctgcagagaggagtcgtcaaatgaagcaaaagaggtggaaaacggacggatatctgaggatatttgcctcttattaccggccccactggaagctgtttgcactggatatggtgtgtgccctgtgcatctgcctggtggacctggccttccccatcgtctctcgcttttccatgcagacgctgctgcccggacagatgttcacggcgtttttcgtggtaatggcggtgctggccggggcttacgtgctcaaggggtgcttttactatatcatcacctactgggggcatctgctgggggtacggatggaggccgacatacggcgggatctgttctcccacatgcaggatctgtccttttccttctatgacaaaaaccgcaccggccagctcatgagccgggtcaccggcgacctgtttgagatcaccgagctggcccaccacggcccggaggatctgttcatctcctccatcaccatcctgggggccttctgcgtcatgctcaccatccggtgggagctggccctgatcgtatttgcggtaatccccctgttcatcctgttcaccaccctgtgccgcaagcggatgatgcgagcctccactgaggtgaaggccaagctggcgggcattaacggggaggttgagtcctccatctccggcatgcgtaccgccaaggccttcgccaacgaggcggcggagagcgccaaattcgaccaggccaacgaccagttccggggggccaagcggggctactaccgggccatggccttctatcagtcggggatggagttcttcatgggcatcctgtccgtggtagtcatcgccttcggcggattcctgctcatgcgggggcggatggatctcatcgacttgaccaccttcttcctctacatctccaccttcatcacccccatccgcaagctctccgccttcgtggagcagtttatgcagggcatggcgggcttcaagcggtttgtggccctgatgcgggtggagcccgacatccaggacgagccggacgcccaggagctcaccgacgtgaagggggacatccgggtggaggacgtgaccttccggtatgagccctccgatccgccggtgctggagcacgtcaccctccacgtccggcccggcgagactgtggcggtggtgggcccctccggcggcggcaagtccaccctgtgccagctcatcccccggttctacgatgtcaccgggggccgggtgctggtggacggaaaggacgtgcgcaccctcacccagcactccctgcgggccaatatcgggatcgtccagcaggatgtctttctctttgccggcaccatctacgacaacatccgctacggccggcctgacgccaccgaggccgagatcgtggaggccgccaagcgggcggagatctacgacgacatcctggacatgcccgacggcttccagacccaggtgggcgagcggggcgccatgctctccggcggccagaagcagcgggtgtccattgcccgcattttcctgaaaaatccgcccgtccttattctggacgaggccacctccgccctggactcggtcaccgaggcccgcatccagtccgcctttgacgagctggcaaagggccgcaccaccctcatcatcgcccaccgcctgtccaccatccgctctgccagccgtattctcgtcattgacggcaacggcattcaggaggaggggacccatgaggagcttatggccaagggcggagaatacgcacagttatatcttgcgcagaaatcggtatctgtatagcacaacctccccaaaacgggacggccctggcgggctgtcccgttttttgtgctgccgtacataaatggggcttgcaaaaatcgaacaaatgttgtatactcaaatcgaacgaaagttctatctaacccattgaattttttcgacccagcccgtctatacagacagagcgcgggcccgggccggcccggtccggtctatgggacagaacatggagtaaaatcggtctgtcaactggaaaaccgatgcaggagggaacgacatggagaccatctattacagtctggatgccaaacgactcactgtctgcggagaagccgcgggccgcagggccagcggcgggcaggagacggtctgctatgcctttgtcccccggccccgccgcccggtgatgcctgcgggcgggaaggtggtggatttcaccgcctaccggcaggccgcccacccggaggagtatgccccgcgggaggaggtgcccggccggccccggccggtccggcggcggcgcacgctggcgctgaccgtggatctggcggccactggcgcggtggttgtgctgctggcggcggtggtgctgcgctttttcgcgggatagaaccgaaaaattgccccggtgcggctctgcgcaccggggcaattttgtgcagagggaaaaatatgcagaagactattgacaaattgagttagcgggtgtaaactcaatttgttctgggcggttagcaaacgctaaccgcctgataaaagataattggttagcaagagttaacctgtaagggagagaagccacgatgatgcctctgacgctggcaaagcagggcgagacggtgaccattcggaagattaccgggaaggatgagatccgccagcacctggccgagcttggatttgtggtggacggaacggttacggtggtcagcgagctgggcggcaacttgattgtgcaggtcaaggacagccgcattgctctggacaggactatggccaaccgggttatgatctgaggagaggagacagaacatgaagacactgcgggatgcaaaggtaggagacactgtcacggtggtcaagctccacggtgagggggcggtcaagcgccggatcatggacatggggatcaccaagggcgtggcgctgcacgtgcgcaaggtcgcccctctgggcgaccccatggagctgaacgtgcgcggctatgagctgagcgtgcgcaaggccgacgcggagatgatcgaaatcgcctaaggggagcagccccggacacggccgcgccgccaaaggcggcacagcgcagccggtactgcatctgtgaattagttatatcaaactcgcggaaaaggaagggactgagagattatggagcttaagatcgcgctggcggggaacccgaactgcggcaagacgacgctgtttaacgccctgaccggctcaaaccagtacgtgggcaactggcccggcgtgacggtggagaaaaaagagggcaagctgaagggccacaaggaggtggtcattcaggatctgcccggcatttactcgctgtctccgtacacgctggaggaagtggtggcgcggagctacctggtgggcgagaagccggacgcgattctgaacatcgtagacggcacgaacatcgagcgcaacctgtacctgacgacgcagctcatcgagctggggattccggtggtggttgcggtcaacatgatcgacctggtgcggaagagcggggacacgatcgacctcggcaggctgggggaggccctggggtgcgaggtggtgagcatgagcgcgctgaagggcgagggcggcatggccgcggcggagaaggccgtggcgctggccaagtcccaccgggcgggtgagctgccccacgtgttcacgggcagcgtggagcacgccatcgcccacatcgaggagtccatcgcggggctggtggacgaccgttacctgcggtggtacgccatcaaggtgtttgagcgggacgacaaggtgatggcccagttgaatctgacgggtgagctgaaggcccacctggaggcccacatcgccgactgcgagaaggagctggacgacgacgcggagagcatcatcaccaaccagcggtacgcgtacatcaacggggttgtgaacaaggccgtgaagaagaaggcggcggcccacagcctgaccacctctgacaagattgaccggattgtgaccaaccggattctggccctgccgattttcgcggtggtcatgtttgcggtgtactatgtggccatcggcacggtgggcgactgggtgaccggttggaccaacgacgtgctgttcggcgagattgtgccgccggcggtaagcggctggctggagggcatcggcaccgccccctggctgcaggggctgattgtggacggcatcattgccggcgtgggcgcggtgctgggcttcgtgccccagatgctggtgctgttcctgatgctgtccatcctggaggatgtgggctacatggcccgcgtggcgttcatcatggaccgtatcttccgcaagttcggcctgagcggcaagagctttatccccatgctcatcggctccggctgcggcgtgcccggcgtcatggcctcccgtaccattgagaacgagcgcgaccgccggatgacggtcatgaccacctgcttcgtgccctgcggggccaagatgcccatcatcggcctgttcgccggcgccctgtttggcggcagcggcctggtggcggtgtccgcctacttcatcggcgtggcggccatcatcttttccggcatcatcctgaaaaagaccaaggcgtttgcaggcgaccccgcccccttcgttatggagctgcccgcctaccacgtgccctctgtgggcaacgtcctgcgggccacttgggagcgcggttggtccttcatcaagcgggccggcaccatcatcctggcctcctccatcatcctctggttcctccagggcttcggctttaccgaggcgggcttcggcatggtggaggacaacaacacctccctgctggcggccattggcggcgcggtgtgcttcattttccggcccctaggcttcggcacctggcaggccaccgtggccaccgtcaccggcctcatcgccaaggagaacgtggtgtccaccttcggcgtgctcttcggtctgggcgccgatctgacggaggaggaccccggcctgttggccgccgtgggcacccacttcaccgccctgagtgcttacagctttatgatcttcaacctgctgtgcgccccctgcttcgcggctatgggcgccatcaagcgggaaatgaataacgccaggtggaccctgggcgccatcggctatatgtgcggctttgcctatgtggtctccctcattgtctaccagctcggcgggcttatcaccggcgaggtctccttcggcatcggcaccatcgccgccgccgccgccctcgttggcctggtctacctccttgtccgcagaaacaagtacgatgagaacaccctctccatttccgccgtcgccgccgcggccaagtaaggagcgcctatgaatgcaccaacaattatcattggcctgatcattttggccgtgtttgtggccattgtgggaaagggcatttacaaccgccgccatggcaagagctcctgctcctgcgggggctcctgcggcggagggtgcggccactgcgcctcgtccgggctgtgccaccctgagaagcaaccgccgacacgccggggcgcggctggcgccccttagttaaggagtcatacatggagctgaccaataccaacgtacgctatcttttgaccatctaccacctctcgcaggcccggctggaggtgtcctccaaggatatcgcccagaccctggacgtgtcccgcgcctccgtcaccagcatgatgtccattctgacagacaagcgcctggtgaccaaggagcggtacggcaaggtacacctgaccgacgacggctgccggtgggctcgggtgctggccagccagacggacaaactggccgagacgctgcaaaaccggatggagctgtcctatgaggaggcgtggaaggccgcctgcgcggcagtctccgagctgccccgccactgttttgagcccatccatgttccagacagacagagaaaggaagttttccaatcatgaagtggtatcagaatccgaaggtcctctgctttgccggcggcgtggccgccgccctggtgggagccaaggttgccaagtcccccaagacccgtgagctctgcgtggccggcatggccaagggcatgaagctccagcaggacgccagggtgaccctccagaacatgaaggaggacgctcaggatctgtgtgcggaggccaagcagaaggcggcccaggagaccgccgaagaggcgtaacgcagccatgagatatcgcatcgcatacgaccagcccggccgccttcgggtgcgcttcggcccggatgcgtttacccaggagcagggctacggcattgccgccctgctcctgggccgtccgggcgtgcgggaggccgtcacctgtgcgctcaatggcagcgtgctggtgtgctacgagggggagggccgggcggaggccctggcagtactccgggggctccggcgggacgccctgccggtggggaccgccgccgacgatgaccagctccgccaggtggacagcctgtttctgggccggctcctttccatggccgcccgccatttcctgaaaaagtggtttcttcccttccctgtccgctgcgccgtgactctgtggaacgcggcgggctactggcgggagggcctgagaagcctgggcggggggcggctggacgtggccgtgctggatgcggcctccatcgccggagccatcgcccggcgggagtggtccaccgccggctcggtcatgttcctgctgggcctgtccgccctgctggaggactacacccgcaagcgcacccagaccaccctgacccagagcttggccatccacgtggacaccgtgtggcgggtggcggaggacggctccgaggaatccatccccatgggccgcctggctctgggggagcgtatccgggtgcgctccggcgccctgatcccggtggacggcactgtcacagacggcgacgccatggtgaatgaggcgtccatgaccggcgagcccctccccgtccacaagcgccagggctccaccgtctacgccggcaccgtgctggaggagggcagtctggtcatccaggccgcggccctggccggcgagagccggattcagcagatcgtgggcctcattgagaattccgaggcgctgaaggccggagcccagagccaggccgagcggctggccgacgccatcgtgcccttcagctttgccggggccctggcggtgggcctgctgacccggaatgtgacccgggctctgtccgtactgatggtggactactcctgcgccatcaagctgtccacccccatctccatcatctccgccatgcgggaggcctccgcccgccgtattatggtcaagggcggcaaatacctggaggcctttgccgaggcggataccatcgtattcgacaaaaccggcaccctcaccgccgcctgcccccgggtggaggaggttctggacttcaccggccggggggaggacgagctgctgcggtgcgcggcctgcatcgaggagcacttcccccacagcatggcccgggccgtcacccgcgccgccgaggagcggggcctcaaccacgaggagcgccacgccgaggtggagtatgtggtggcccacggcgtggccaccaccctggagggggagcgggccctcatcggcagccgccacttcatcttcgaggacgagggcgttgcctgtaccgacgaacaggctaggcggatcgccgcggccgcccgcggccgttcggtgctctatctggccatcggcggcaggctggccggcgtgctgttgatcagcgatccgccccgccccgaggccgctgaggccatcgccgccctgcgggcgctgggggtgcgccgggtgatcatgctcaccggcgaccaggagaccgccgcccgggcggtgtgtaagcggctgggcatcgacacgttccgcgcccaggtgctcccagccgacaaggcctccctgatcgagggctacaaggagggcggcagcaggctcatcatggcgggcgacggggtcaacgactcccccgccctggccgccgcggatgtatccgtggccatgagggatgcctccgacctggcccgggaggtggcggatattaccctcctctcctccgatctgcgggagctggccgccctgcgccgcctctcccagcggatgctggagcgcattaaccgcaactacaggtcgattttgaccatcaacaccagcctgctggcgctggggattttcggcatactgccgccgaccaccacggccctgctgcacaatgcctctaccatggccatcagcgccgccagcatgcggccctatctgcccgcgcccggcgggcgcggggcccagggaaaggagcctggcaatgaaacagcatagattctgggcttggggcgccgtgttctgtatgctcatgtgcatctacaccggcaagcgccgcaagtaaagcaaggcagagaaggcccctccccgccgtccggcggagaggggcctttgccgccgccgtgacaggagagcgcgggcatgcagtcaccacgccggacggcgggactgtccggcagtgagctggcggagggattgggcgcacagcgcgccgtagaacttcagatacttcttttttgcctggcgctggaggcgctggcgctcctgaaaggccttccagcaggcgcagctcttgtggcagccgctgtggtaggagggacattggctctgacagggaagcatgggggttctcctttctgcgggggcgggaggtacggttcccgtccattgtaggccggatcagagcccaactgccaccatggtgctgtaaaagggaggtaaataattggagtttaccgcatttgtagagcatgctcactaaaaataatgacaaataagaggataaatatatacaatctaaacaaaatagagtggctgaaatcgggcaaaaggcagaataatgtgagcatggttgcaattggaagatgctcatggtatcatgcaaaacaccttgcggggtcggggctctgaccactggagactccgcgccggaggactcctggtcgcaaggaaagaaaaagaggaggaaacatgaaatgaaatcccataagccatccaaactgatcgctctggggctcgccctcaccatgggcctgagcattcccgcggcgctggcagccagttctctggtgcccgcctccaccaaggtcacggtggacggtaaggcggccgctgtcgagggatacaatattgacaacggcaacaactattacaagctgcgcgatttcgccagcgcgctggacgtgggcctgacctgggataaggccaccgacactgcggccatcgacaccggctcccactacaagcccgacgccacccagctcatcaccggcaactgggcccccgctacccgcgcccgcatccaggccgtgattgacgagaacaccaaccagggcaagtacgtggtctttgactttgacaacacctccgtgatcttcgacattcaggaggccctgctcatctaccagattgagaacctgcaattcaagatcgaccccgccgacatggaggccgttctggagaccggcattcccgacctgaacaagtccatgggcaccagcctggacggcaagaacatcacccccgccaccctggtggccgacatcaccagcgattacgagtggatctatgccaactacgagggctttgagggggacaaggacctcaactacatccacgcgtccaaccagtaccaggacttcgccgccaagctgcgcttcatgtacggcaacctgggcgactactttgatcacgccgtctcttacccctgggttggctatctgttcaccggcatgacccccgacgaggtgcagaagctggctgccgcctcccaccagtattgggcagactacggccgctatgccgaggaaacctggacctctcccgtggagctgcccggcaagaccggcattgtctcgattgactttatcaccggcctgaccttcaccgacgagctgaaggacctgtatgccaccctccaggccaacggcatcgacgtgtatatcgtctccgcctcccccatcgacaccgtgctggccgccaatgagaccatgggctacaacctgcccgaggaccacgtctacgccatgcgcaacaagctgggcgaggacggccgctacatcaacgagtataactacgactggggcggcgagggcaagtacgcccagacccagggtgagggcaagagcaccattatcaccaacttcatcgcgccccagtacgacaatgccgggcccctgatggtcttcggcgacagctccggcgactggaacatgatgaccgactggatggagagcggcgacaccgagctgggcgtcatcttcaaccgttaccgcaagcccggcagcgaccccatctggcagggctccaacgaggccgcccagtccatcggcgatcctgacgcccgctttgtcctccagggccgcgacgagaacaccggcgaactgcgccccagcgagaagtccatcctgctgggtgagaccgacgaggtgctggtccgccccgccgagtaaggcagacataagcgcaatttcatatacggcggcagccgggagtggagcctgcgggctccctcccggctgttctgatcaaactttaagatttttttaatgaaaaccgggaaccttgctctggacatttcgtctgtaatgttggataatggaatatataaccaagaaaaaacctgcattggaaggagagaatgaacatgaagcgaacccatagagggcttgcccggctgctgtccgcgggtatgagtctggcccttttaacgagcctggtacccggggccatggcggcgagccgaaatgtagaatacgaggtggatgcggatgaggttctctacttggaaaaggaggacttcgataaatttgtgtatgacgaaacgtcacagggtaccgaggtggatgagctctggtttacaagcttaccctcgtccagtaagggtgtgctatattttgactatgacggccgagacgaatatgaggtcgaaaagcgagagagctttacccgcagagacctagatgatctcgcctttgtgccagatgaggactacgatggttccgtaacgatcggttttagcggtgagtccgaccagggtgagaatttttctggtacactttatattgaggtcaatggcacagggcgttcatcctctgacggcgaagtgacctatgaggtggatgtcaacgacgccgtggatctggacgtggacgattttgacgactatgcctacgacgagtcggacggcaccgaggtcgattacatcttcttcaccgacctgccctcctccagcaagggcaccctctactacgactatggctactccagtgaacgcgaagtagagaaggacgaggagttcgaccgggacgagatcgacgacctgacctttgtgcccaagcggaattatgaggggacggttaccctgtccttcgagggccggtcggacgcccgggataagttctacggcgacctggtcatcgaggtgggcggcggccggagcagcagcgccgccaggggcgacgtgacgtacgatgtggacgtcaacgacacggtggacttcgactatgacgacttcgacgagttcgtctacgacgagaccagcggtaccgaggtgggacgggtctggttcaccgagctgccctcctcccgggagggcaccctctaccgggactatgacaagcgggatcaggaggagattgacgaggacgaggaaatccgccacgacgagatcgacgacctgaccttcgtacccaagcgcaattttgaaggggcggtcaccatcccctttgagggcagggcggacgacggcgacaagttctccggcgagctggtcattcgggtgggcgatgccggcggcgccgacatcaccgtggagctccaggccggcaacggttccaccgtcaacttccagacggacgcgttcaacgaggcctgcgtgaaggagaccggcgccaatctgaactatgtgatctttgattacgactccggccgcggcggctatctgtactaccagcacggcgagtccggcgagtctgaggtgggctccggccgttattaccgcgcctcctctccccggctggaccaggtttcctttgtccccggcagcggcaccggcagctccgtgcgcatcccctttgagggggaggccaccaacggcaagtccttctacggcgaggtcaagctgacctatgtgacgctgagtgagcccaccatcatcacctacacctccaccggcctggccgtggacttcaacgccgccgactttaccgccgcctgcgcggcccggggcggcaaggccctgacctccgtccggttccccgcccccgacaccaccggcggacagctctactacaacttccacactcccacccagtaccgcggcgaggtggtttccaccgtggactactccgtgggcggcgtctacctgctgggcgaggtcaccttcctgcccaaggcgggttacagcggcgttgtaaccatcccctatgtgggtaccgatgccgacggcatcgagtataccggcaccgttcaggtgatggtcacgccctccgcctcctcacgcttcagcgacatgggcagctataacagttgggcgggagcctccgtggaattcctggccgcctacggcattaccaccggtacgggcgacggcgccaccttcagccccgcctccaccctcacccgcggcgactatatcctgatgctctaccgcacctttggcttcagcagcaccgccgccgcaggcaactttactgacgtggccgccggcagctactacgccgaggccctggcccatgccaaggctctgggcatcgccaccgccgaggcggacgggagcttccgccccaacgaccccgtcacccggcaggacgccatggtgttcctcctgcgggccatgcaggccgtcaaccggtctgtgcccaacgcctatgacagctacctgagccgcttcccggatggggcctccgtggcggactacgcccgcacggccatggccgccatggcccaggccggcgtgatccagggcaacgagcagggcaagctcaaccccaccggaaccctgaaccgggcggagatggccgtcattctccaccgcgccctcaccctgtaacccagctcccaagccggggccgcccagcggccccggctttttgtgcaaaatatgggacagggaggcttgaaaagggcggcttgggtatgatatagtatcaaggtattggtatcggctgcatcccttcggatgtggtcgtttttgtgagacggaaccgggggtatggacgtgtttgacggacttctgtttgatctggacgggaccctgtgggattcggtggatgccatctgcatctcctggaaccgggccctggagcggcttgcgccggagtatgccggcaccgtgacccgggcgcggctgctgccgtgtatggggatgctgctgcccgacatcctccaccgcctggtgccggagctggaccaggagcggatgaagcccattctggaggaggtgctgtcggaggaaaacgcctatgtggccgcccacgggggcgtcctctaccccggggtggagcagaccctggcggcgctctccgcccgctgtcccctctttctcgtcagcaactgccaggacgggtatattgaggcctttttccaggcccatggactggggcgctattttacggactacgaaaaccccggccacacggggctgcccaaggcggacaacatcgccctggtggcggagcggaacggcctgaggcggcccctctacatcggggacacccagggggactatgacgccgcctccaaggcgggcgtccccttcctccatgccgcctacggcttcgggcgcattgaccgccctgtgccctcggtggctacctttggggatcttcccgatgcgatccgccgcctcactccgccgtaaggcggggcgatgtaggcatcgccccctacaacgtccaaatgcgggcttgttcccgccgtaggggcggatgcccacatccgcccggcccccatgcaccaactctatcaaggaggacattaccttgtcacaatacgagaaagaaatcaatcgccggcgtacctttgccatcatcagccacccggacgccggcaagaccaccctgaccgagaaattcctgctctacggcggggccattgcccaggccgggcaggtcaagggcaaaaagaacacccgggccgccacctccgactggatggagattgagaagcagcgcggcatctcggtcacctcctccgtcatgcagttccagtacgagggctactgcatcaacatcctggacacccccggccaccaggacttctccgaggacacctaccgcaccctcatggccgccgacagcgcggtgatggtcattgacgcggccaagggcgtggaggcccagacccgcaagctgttcaaggtgtgcgccatgcgggacatccccatcttcaccttcatcaacaagatggaccgggaggcccgggactccttcgagctgctggaggagctggagaaggagctgggcatcgagacctacccggtgaactggcccatcggctgcggcaaggacttcaagggtgtgtacgaccgggacagccgcaagattatccacttcacctccaatggcggagccaaggcggccaccgccaccgaggtggagctgggcgatcccaacctggacggcctgatcggcgagcggctccaccggcagctcaccgacgagattgagctgctggatggcgcggccgccgagtttgatctggaccgggtgcgccacggcaagctctccccggtgttcttcggttccgccctcaccaacttcggcgtggagcccttcctggagcacttcctccagatgaccaccgcccccctgccccggcgggcgggcgagctggtggtggactccctggacgacgacttctccgcgtttgtgttcaagatccaggccaacatgaacaaggcccaccgggaccgcatcgcctttatgcgcatcgtctccggccgctttgacgcggataaggaggtgtaccatgtccaaggcggcaagaagctccgcctgtcccggccccagcagctcatggcggccgagcgggagatcatcgaggaggcctacgccggcgatatcatcggcgtgtttgacccgggcatcttctccatcggcgacaccctgtgcgccccgggcaaaaagttccgcttcgaccccatccccaccttcgcacccgagcacttcaagcgggtgcgctccctggataccatgaagcgcaagcagtttttgaagggaatggagcagatcgcccaggagggcgctattcagatctttaagaccccctacaccggcatggaggaggtcatcgtgggcgtggtgggcaccctccagttcgacgtgctggagtaccgcctcaagaacgagtacaacgtggagctctacatggagggcctgccctacgaatacctgcggtggatcgagaccgacgacggcgagcccgtcaaggaggaggatctcatcctgggcaccgacgtgaagctggtggaggactacaagggcaaccagctcctgctgttcggttcccagtgggccatcggctggacggaggagcggaacaagaacctcaccttccacgagttcggcggcaccaaattctaataaaatgaaaaaccgccccccggcctgcgccggggggcggtttttgacacgccagttactgcacgggggtgtagctgaggggggattcctcgtccgtggcctccagcttgaagataacgggccgcaggccgtcgttgcagctgcaaatggccacgccgggcttgcgaatccagtctccgtagtagaacagcccctcccccgcgccgtgggccagggcgaaggcgtactggtagaccgccttccacgcctcgtcacagaagccctccggcttggcgtagtcggcgtaaaagacctgcccttcccgcagcatgggacaggccgtcagcccctcggcgccgtattcctctgccagctcccggtccagggtggttttcagaacggtaattttcacgcgcttcataacaatccctcctcgtgtgagaataggatagcaccgctcaagggcattgggcaaggggaagttttccacacgggggaccaaacgggtggaaaagtcagccctggctgtggggagcgagcctggctttaccgcccgcccggtccagggccagcgccaagacagtaaagaccgccccgctgcccaccgcctgtaccagcgtgcccaggaactggggccagaaggcgttgacgccgcccagcagcaggcaggcggccaggccgtacgccgccggggagagcaggcaggccagcagaagggccgccccgttccgggggcagaggagccgcggggcccggctggtaaacaggagggccaccagggccttgatgagcagcgtggggaccacccacagaggggcggtgagcagatccgccagcccggcccccaccatggcggcgcccacggcgtagggggcgggcagcaggcaggccgccaggtagatcagcgcgtctcccaggtggatgtagccgccggtggggatggggatatggagcagataggcggtggtgaccgcaatggctccggcgaacagggcggctaggcagagcagccggagttttttcgattcgcgcacaggggctccctccttgtttcatctgtccccattgtacgctccaactgaccttgttaaaagtatcagaataaatctattttaaaaggtcagacgaggtagaagaaacacacaaaacctgccccatccccataaaatagggcagggaggtggaaaaatggaagagacagtcctgcgggagcagctcaggacggtagatgaatccctgctgtttctgctgttgatcgtactgtcggtgctgctctcctactggggggtgcgcatacagcgggaggggctgtgcagaaccctccagggggatgccgagggggcggccgccctgccccgggtgtttcccatccgcctgagcgcctcggccctggtggtgggagcgctgggctttttcctctgtctggccctcaagacggagcgggagaccgcccggggcgggacgccggcggcccggcggtcggcgtgcaccaacctgtgggcctccctgtttgtctttctcgccgccctgctgcggctggacgacctgctgggcacccgggatgcctcgggggaggtcatctgaaataaagcaggcgcgccctgcggcgcgcctgtcgaggatgcgggtcagtttgccggccccttggcaaaaaaggtataaaccccggtggccaccgtccggcccgtgtcgtcggtgagcacggcctcgtacaccaggacggttttgcccagcttcctgggcgtggccgtgcaggtgatgcgcgctccggacgccggggccagatactgcatggagcagtccagggtgacgcacatgtgcccggtggtgaaggccgccgtgccgcacacggtgtccgccagggtgaccagcgccccgccgtggacgatgcccatggggttgaggctggagggctgcacctccagcacgcccacggcgctgtgatccggccgcagctcggtgacgtacatgtggttggcgggggcaaagcagccgctggtattcaccagctccagaagcttactgtaggaatccatcgagaatcttctcctccgcctcctgctcggtgaggcccagggtcatgagcttgagaatctggtcgcccgcgatgcgtccgatggccgcctcgtgaatgagctgggcgtccacatggttggccacgatggcggggatggaggaaattctggcgtcgcccatgatgatggagtcgcactgcacatggccgaagcacctggcgttgcccgtcaccttggggtagaacacctgctgggactggtcctgggccaccgagcgggacaccacccggccgttggccccctcgccgtccagaatgatctccatatcgctctcggcggtctgctccccgtgggtgagcagcttctcggtgatgatggcctcggcgtccttccccaccacgattttcgtctcccgcttggtggagtccacgccgcggatctgggtgctctccagattgatggtagccccctcctccagatacacgacggtctgggggttcataatgcgcttgccggtgccggggccctcgccgtagtggcgctccacatagcggaccttggagtttttgcccacgtagaaggtgtgcacgccgtcgtgctggctggtctcgcagccggtgttgtggatgccgcagccggccacgatgtccacatcgcagtcctcgccgatgaagaagtcgttgtataccatctcgctcagcccggtctggctgatgatgaccgggatgtggaccgactcgtgcctggtgcccggcttgatgcggatgtcgatgcccgacttgcccggctcggtcttggtggtgatctcaatgttggcggtgctgttccgggagtccagcgcgccgttgcggcggatgttgtaggccccctggggggtcttctccagctccgcgatctctttcagcagtttccattcagcctgatccatgcttacctcgccccctccgacatatagctgcacccggccgaggtgttggccaggatctgggggaaaatctcgtccttgggcccgtgcttggcgattttcccgtcgcggatcatcacaatctcgtcggccaggtcgatgatgcgctcctggtgggagatgacgatcagcgtggcctcccgcttctggtggatggccttgaaggtctcggtcagcttggcaaaggaccacaggtcgatgcccgcctccggctcatcaaagatcatcagccccgacttgcgggccagaatagtggcgatctcaatgcgcttgacctcgccgccggacagggaagcgtccacctcccggtcgatatagtcggcggcgcacaggcccacccgggtcagatactggcagccctcctcccgggtcagcttctcgctgcccgcggccagggccagcagatcccgcacccgcaggcccttgaagcggggcggctgctgaaagccgtagctcacccccaggcgggcccgctgggtgatgtccaggccggtgatgtcggtgccattccaggcgatggtgcccccggtgggccgcaccaggcccatgatggccttcgccaaagtggtcttgccgcccccgttggggccggtgatgaccacaaactgatggtcagctacggtgagggagacgtcgttgaggatacccagctcctcgccggactccccctccacctggtagctgagatgctttatctccagcatacgcggtctctcctttgtactatgcttcttctcatgagatgttattttatcacggcgggggggaaaatacaaccctgccgggcgcaaaaaccacactattcgcataggataaggtgaatccaaatcatcaggaggctttgtctatggaacaagatcatttgccctgctcctgcgaccaggaggtctttgagcgggtgtggcggcgggtgatgcccgaggaccggcccgactgcccctttaccctgggcgaggacgccgccgcccctccggccatccagccccccgcggcggcgctgcctgccgtggtacatactgctccagccggcgaacaggcgccctcccggcccgtggtgggagaagagcacgacgtgccctgcctgggggcgtcctcggcggtgtacggcgcccagctccagcggctcattgaccgggaactggcggattggagggcctatcaggccctatcccgccgggcccagggaaacagcgggcgggtgctggccaccatcgccgccgacgagcgccgccacgccaagcggctttccaccgcctattttctcatctccggggtgcggtactggccggtagaccgggtacccaatccatcccccgcccccttctccgccgccctgcgggagcacttcatggaggagcagcggggggcggccgcctaccagaccgcggcggcggagactgccgatccctgcctccacgagctctttctggagctggcgggggaggaggactcccacgcctggctcctgcgcagcgtactggagcagctataagaacacccccggcgcacggctttgccgcgcgccgggggcctgcttttagtatccgttgaccacagcgtccagcaccctggccgccacggaacccgccgcgtccgcgccggagccgccgttctccaccagcaccacgaaggcgtagggggcgtcggggttgcggaggaagccggcgaaccaggcgtggggggccttgccgccccccacctcggcggtgccgctcttggcgcacacgtccatgttggggaagcgggaggcgccgtactgagccgtgacattgtgggccatcagctccgccagggcggcggcggtatccccctccaccagcttttgggtgtgccggggcagggcgggcagggacggcaggcccagggcgttctccgtcttgagcaccagccggggcacggccgccgttccgccgtttgcgatggcccccatatagaccatgagggcgcaggggttggccaggtcgttgtactgccccacgccggcccagcccagctcgttggccgtgaggccgtcaaaatcgaaggagccggcggcggtgttcaggccgctgacccggtaggaggaggtgagccccgcccggacggtgtactcctccagcacgtcctcccccagctcgccggccagcagggcgaacaccccgttgcacgagttggccagggcggaggagatgtcctgctccccgtgggcgtgggggcaggtgatggccccgtcccccacctgggtggagccggtgcaggtccaggtgcggtcaaagagatcgggcatgcgctcaatggcggcggagagcaccacggtcttgtagaccgagcccggcgggaaggtgccggagaggaagcggttgaggtacgccccctcgtaggcgtcgttctcctccagctcctcggcggagggagggttcagcgggtcgaaggcgggggcggacaccatgcacagcacctcccccgtctcgtagttgtagacgcccaccgcccccttgcggccggccagggcctcataggcgatgtagttgtaccgggcgtccagggtgaggtagaggtcgttgcccgcccccaggggggagtaggccccggtgagcaggttgtagccggagagctggtcggcaaaggccaccagcgccccggtgccgatgttgccctgggcgtcccccacggcgtggagggtggccttgcgcacggtggcgttgtcgtaccagcgccgggtgccgtcctcctccgtccaggagagcacgtccccgtcccggtccagcacccggcccaccgagagctgtccctggcggttgtagaggtggcggttggcggcaaaggagacccagcggccgccgtttttcacgaagcggaacacaaacaggccggagcccagcagcagggcggcggccagcaggaggcagagcagggcccgcttttcaatcttcttcatcgtccgcctcccattcgtcggtggcttttggggccagcgccgccccccggcggtcctcccgccgggagggcaggcggatggcaaagctggcgttctgacgggtgtcggtggccttgaggaaggccagcagcccccaggaggcgatcatggccgtgccgccgttggacacgaagggaaaggtgacgccggtgagggggagaatgtccaccgcgccgaacacgttgaggcaggtctgaaacaccatcatggaggtggcggcgcaggcggcgatgacgtaaaaggagctccgcccggcccggcaggcccggacggcgaacaccgccagagtgagaatggacagcaccgccagcagggcgatgatcagcccccactcctcgcacagcatgccgaacaccaggtcggtgtcccccgcgcccacggtgtggagccagccctcgccggggcccacccccaccaggccgccggaggcggcggctgacatggtgcgggtctgctggtagccgctgcctaccgaggcgttctgccacgcgtggccccaggtggcgaagcgctgaaggatgtagggcttgagggagagcatggtgagcaccgcaaacaccccgccgccgcagatgagggccagggtggcccagtcgccggagcggaggtaggcgataaccaggaaggtgacaaagaagatggcggcggtgccgaagtcgctcatataggccagacaggccaggcacacgccggtgagcaggatgaacaggcccaggttccgcttgcggaagagccggtccagggtggccgccccggcaaagatgtagcagattttggccagctcggagggctgtaccgagatgccggcaatggtcagccagttggccgctccatatttggtgccggtgaggcccaacaggtagagcaccacggtgaggctcagcaggccgatggccccggcggccatgagccagcggattttcttggcccggtccaggttgcgcaggaagacccccagcaccaggaacagggccagtcccagcaccacgcagaggaactgcttgaacagggcgggggtattggaggaggaggtcaccgccagggagagggtggacaggaagaaggcgatggtctccatctcaaagcctacccggcgcagggcgcggagggtgaggaagtacagccacatcacccccgtcagcagcaggaaggtgagcgggatcatcaccgtggcgttctccccctcgctgatggtgagctggagtgcggtgagggcctggaacacggtgaggagcaccagccccagccagggggacacgggccgcatggcccgccgccgctggcggcgctgagccttttcctccggagagagggggagcagcacggtctccaccccgccgatgcccaccacgtcgccgtactggacgggggcggagccctccaccggcctgccgtttaccgtcacgccacccttggagcccaggtcgtaggccgtccaggtgtcgtccgcctggcgaatcagggcggcgtgctgccgggataccacaggatagttgagaatcacgtcggagttgccgccccggcccaggatgttctcccagtgggtcagcggctcctgagccccgttgggcagggtcaggtaggcccacacctccggcagacagggcacggtgagcagggagcggatcgtccgtatgagaatcagcagggccagcaccgggaacaaaaagcgcaccgccgtggtgaaccaggcccagacctggggattggcggccatccagtccagcagcgcctccatccgcccacctccttttcgttggaatatacagcagtatagcacaaatggggccgataaaaaagcggaaggccgtccgccttccgcattcttcaagaattctttacaatttgccctctccggcggtataatgggctcaccaatgagaaaggatgtgagcccgtgtctacgattatcgacgccaagggcaagccctgccccaccccggtcatcctggccaagcaggccatggccgccggggaacattccttcaccgtgctggtggacaacaccacggcggtggaaaacctcaagcgcctggcgggcaaccaggggttcggagccgccgtcacccagggggagggggtgttttccgtggccttcacccgtaccggctgcgccgcctgtgaggaggcggtgagcgctcccctgcccgcccccggcggcgactgggccgtgtttgtgggccgggatatcatcggggacggcgaccgggagctgggcgccaacctgatgcgcatgttcttctacactctggcccagggggaggacaagcctggcgcggtgctcttcatgaacgccggcgtgcgcttgcccaccctggacgagcagattcccgcccacctgaagtccctggccgatgcgggcgtcgagatcctggtgtgcggcacctgcctcagcttctacggcctcaccgaccagctccaggtgggcacggtgagcaacatgtacgacatcgtcacccgcatgcagcgggcggccaaggtggtctccctgtaatggactacggcgtgatcaccttcacctccacctacggggccatctacgcccagaaggtgctgcgaccggtggcggatgtgctcaccatgccggtgctgcgggagatctccctgggctgcggcatcgccgtgcgcttccggccggaggacggggcggcggtgcgcgccgccctggccgcctccgccctgcggccggacgagtacgccttttacggtgttaccggctccggggcggccctgcgggccgagccgctggacgggtaggggccgcccggcgctcagaagatccagccgatgagcagggacagggcaaaggccacgacggcgggcatgaagttttcccagcgggtgggcttgtcgagcagggccttgatgagcagcaccacgcccgcgatgcgcagcagccagggcagcaggcccatgagcagcaggaagggcaggcccaccagaaacaggatgacgggaatgagaatcacagcggccagacagatgatgcccagtgtgaacagcgtaaccatggaatcagtcctccttttgatggtaccagcttatcacacccagataaaagcgtcctaaaggcattcttaaaatcagataaaaaatccccggcgtcagggggcggggctgtgccatccgcccctgacgccggggcctttttctgcgttccggttcggccaaacggttttcataaaagtctcgcttcgaggctgctttcccggcagaacgtaatggatatcagatggatgcatagaataaatgccttggggcacgaagaaatgggcaggactgtcatgtgaaaaggataatagtccttttcttgtatgcaatttggtagataatatgatagtatgtgtgctgtggcagcattcgattaccgtgatatgctctgtggcatggaacactcctgttatactgctcctgtcggtacagcatttcttgctgccattccgtttggttttggaatgattagcggtttcatcacagactcagagcaagggagggcttgcgaatggcagatacagattacatctttcacatcagcccgtatgataccgaaaagcttttgccgcaagtgagcagggcgctcgaaaaaaggacggaaatggtttcgcgggaacgatttcccgggctatggaagcataccgaccgattccgctctatggcgcgggggcggaaaaggagcaggctacgcacaaggggaatgagtgcgttatgtctggcggccggcatttttctggctgttcccggtctgatggagccgcgagagctgttcgtgccgctgcttgtcggcgcggctgccatgggtgcgggtatcattggcctgtggcagagccgcgcgcgcaagaagaatccgtttgatagagcggcaaagatattgttggagggcaaagacaagagttccgcggagcaagccgcttcggtgtccttctcagaggaggggatgaccgttccggcgggcggcggcaaggcggaatttgtgccatatcgagagtttgaatgcgccgtcgaaacggcggatagttttcttttcgtctttggcggccgtgtcctgctgttgcagaaaatggacttaaaagcggaatgtaccggcgatttttgcagtctgatctcggaaaaagtgaaaccgtatcactcgattgcgtaaaagggcggcggcagggaaagcccatgaggctgccgtcagagcggaaaaacgcgcccgcctcattcaaaatgaggtaggcgcgttttcatgcgcagcgcgcttgacaccgcgccggggatttttgcatcaacggaagtaggccgcgccgctctcgaagaggggctggtgcttgtcgccggggatgttgacgcctacataggggccccggcgctccgagtggcccatcttgccgaacacccggccgtcgggggagaagatgccctcgatggcctccagggagccgttggggttggcgtcgatgtccatggaggccgcgccggaggcgtccacgtactgggtggcgatctggccgttggcgatcagccgctccagctccgcctggggggctgtgaagcggccctcgccgtgggagatggggatggcgtggaggtcgcccacatgggactggagcatccagggggactggacagaggccacccgggtggtgacgtaccggctctggtggcggccgatggtgttgaaggtcagggtggggcagccctcgtccatggcccggatctcgccgtagggcaccaggcccagcttgatgagggcctggaagccgttgcagatgcccagcatcaggccgtcccggcgcttgagcaggtcgtgaaccgcgtcggtgagccggccgttgcgcaggaaggagcagatgaacttggccgagccgtcgggctcgtcgccgccggagaagccgccgggcaggaacaggatctgggccgcgcggatggccttttccagggccagggccgactcctccagggcggaggcggtcaggttgcgcaccaccacgatctccggctccagccccgcccgcaggcaggcccgggcggagtcgtactcgcagttggtgccggggaacacggggatggccaccctgggccgggcggttttggacttgcacaccgccggggagcgcttgtcccaggagagggtgcgcgccggggcggactcccccgcccgggtggggtacacgtcctccagcaccccctcgttgagggcgagcagctcgtcaatgggggcggagtcgccgccgatggtgatcaccggctcggcggtggtggtgcccagcctgatcgccagggggaagtcaagctcctcggtcagctccgccacaatggagcggggccagggagtgtaccagttcgtgtccacatcggaacccatggcaaagccgatcttgttgccgaaggacatgttcatgaccgcctcggcaaagccgtgctccaccgcccacgcggacttcactttcccggccttgtgcagttcacggagcttgtcccaggccgccagagggtgctcggccagagcgtcgcctacgaacaggtacaccgggtgccccgcctccttgaactcgggggagagcacctcacccgcctggatgggcgcgatggcgaaggagatcagcgtggggggcacgtccagatcgtggaaggtgcccgacatggagtccttgccgccgatggcggcgcagcccagctccaactgggcgtccagggcccccagcagggcggcgaagggcttgccccagcgggcgggctcgtcccgcagcttctcaaagaactcctggagggtcagataggccttccggtagtccgcgccggcggccaccagcttggctacggaggcgtagaccgcgtcctttgccccctggtaggggtcggcggacagggcctcggggtcgcagccccaggccatgacgctggcctggccggtctcctgctccggctccacggggaagagggcggccatgacctgggccggggtgcgctgggtcctgccgccgaagggcatgagcacgctgcccgcgccgatggagccgtcaaaccgctcggtgaggccgcggcgggaggcgcacttcaggctggcggccatctcccgcagggtggagaaggtcgccctctccggggcggcgtccgcctggggcacggacacccgggcgtgcttggccgcgccgttggtgttgaggaaggcccgggacaggctggccacggtctggccccgccaggtcatgaccatgcggggctccgccgtgaccgaggccaccgggtaggcctccaggttctccctggcggcggcggccagcagggcgtccacgtccgccggggccaccaccacggccatgcgctcctgggactcggagatggccagctcggtgccgtccaggccgtcgtacttcttgcgcaccgcgtccaggtcgatggacaggccgtcagccagctcgccgatagccacgctcacgccgccggcgccgaagtcgttgcaccgcttgatgaggcgggtgacggcggggtcgcggaagagacgctggagcttgcgctcctccggggcgttgcccttctgcacctcgctggccatggtgtccaggctggccttgttgtggctcttggaggagccggtggcgccgccgatgccgtcccggccggtgcggccgcccaggaggatcaccacgtcgccgggggcgggccgctcccggcggacgttggacgccggggccgcgcccaccaccgcgccgcactccaggtgcttagccacatagccctcgtggtagagctccgccacgtggccggtggccaggccgatctggttgccgtaggaggagtagcccgccgcggcggtctgggcgatcttccgctggggcagcttgccctccagggtctgctccaccggggtgcgggggtcgccgcagccagtgaggcgcatggcctggtggacgtatacccggccggagagggggtcgcggatgcacccgccgatgcaggtggccgcgccgccgaagggctcgatctcggtggggtggttgtgggtctcgttcttgaacatgagcagccagtcctgctccttcccgtccacctgggcgggcacgtggatggagcaggcgttaatctcctcgctctcgtccagctcggggagcaggccccgctttttcagggtcttggcgcccagggtggcgatgtccatgagggtctggggccgcctggcggccttctccgcgccgtagacctccacccgggcggacaggtaccgctcataggcggcctttacgttgtcatcggcgatctccacctcgtccagatgggtggagaaggtggtgtggcggcagtgatccgaccagtaggtgtccaccacccgcacctcggtgagggtgggatcgcggccctcctcgtcccggaagtaggcctggaggaaggcgagatcggccagatccatggccagggcgtactgggccagcacgctctccagacccgcgcggtccagggcggtgaagccatccagcacgggcacggcggcgggaacggggtagtcctggcggagggtggcgggcttgtccagcgccgcctcccggctctccaccgggttgatgaggtagccgcgggccttggccgcctcctgggcggtgagggccccctccagcacgtagacggtggcggcgcggacggtggggcgctccccgccgtgcatcatctggatgcactgggcgcaggagtcggcccgctggtcgtactggccgggcagggcctccaccgcgagcagggtgtgctccccctccggggcgggcatgacctcatcccacagggcgtccacctgcggctcggagagcacggtggtgcgggcggcggcatagaccgccgcgtccaccccctccacgtcgtagcggcgcagcacccgcacgccggtcagccccgtcaggcccagggtgtggcgcagctctccaaacagatgctccgcctccacggcgaagccgggcttcttctccacataacagcgaaatacgttccccatactctctttctctcccttatgtgatcttccagtcggaaaattgatggaatatgttttgctgggtgggcgtcagcccgtcgatccggctccactgggtgagcacggaccagttcttgaagcagatgaccgcgaaggggggctgcccggccagatattcatagagctgccgggccggctccgtccgccactgtcccacggcggcccggaaggcgctcaggcggttcagcgcctcggcgtcgctgtacttgccgtagttgagggcgccgccgggggtcaggaaggcggtgagatcaaagtcggcggtgagccgcacctcccccagatacaggtcgaactcccccgccgtcagggcctgaaggtaatcgtcccaggccagggcccgcagctccacctccaggccggcgtcggtcaggttggcggccagcgtctccgccgcggccagccggtcggcgttgttgtttggggccacaaaggtgagcgccagcggccgcccctccttctgccataccccgtcggctctggtgtagccggcagcggtgaggagcggctccatggcctggggggcgtagtccagcgtctgggccagcgcctcgtcgtagagggggctggcgggggagacaggaagggcggcgggctgggcgtggcgggagaactgggcggtggatacggcggcccggtcaaagccccgcagcagggcctgccgcacctgggcgctccggcaggggccgtcggccgtgttgaagccaacgtacagcatggtgctggtggggtagtccaccgcagcaaaggaaccagaaaaacccagggcattggtgcccgtcaggtcggtggagaccagggcaatgtcccgggtatcaaaggcatggatcagatcgtccgcctcctgaatggctcgcaggggaatggtgtcccggggcagggccttgccttgccaccagccggagcgggcttccagcgcgaggttctcccccgtgccggcgagcacgtagggccccgtgcccagggggacgcctcccgtctccttgacgatggggatgtccagcagggcgggcagagcaccgttggcgcggctcagggtgacggtcaccatgccgttggcggcggcgatgtccgtcacgccggcgaagcgggcggagtagagggggctgatgcgggccaggttgagggaggccgcgatctccgcggccgtcagggggctgccgtcggagaaggtcaccccgctgcgggggataaaggaccactggaggccgtcggccgacacggaggcggaggcgcagagcgcctcctggggctgaaactgcccgtccagggcaaacagcccctcatacagcaggccccccagggccaggttggtgcggttggagccggtgatggggtggaacccggcctctgggtagcaggccagggcgaactcggccgcctctggagagggggagacgctgggcgtgggggtgggtgtgggctccggctccggcgccggcccgcaggcggccaaacccaggcacagggccgccgtcagcagggcggctagaatgtttcgcaaacggctcggcctccttcctaaaggcgcgtcgattttctgcggaaaatctctgccgctgcgcggcaggatacgcgccttccagagggaaccagttccccctagatacgcgcctgcggcgcgataccccctccgctctccgagggaattttggattggcgtacaacggcaatggagcatccatattttatagctgcttatctcacagcgttttccccgccctgcggggaaacgaaattgaaaatcagtctttccgggaattcattttccggaaagacaccccgacccgcgccacagggcgcgaaaccgggggtatcgagccaagtcgccggcgttttcgccggcacgcaggctcgtatctaggggtcggaagcgccggtggcgcttccgatgaagtccagacggagtctcctcagacgccattggatgccccctagacgattgcgatcatcgccgcctggctcccccgctccccgtgggtgtaacggtgggaccagtacttctccggcaggcagcaggtacagtcggcggagacagcgatgtgttcgggggccagcccggcgctctccagccgcttggcgttgaggcccttgagatccacgtggaacttgccggtgggcagcacctcgatggaggacagggcggcggcccccatggcctcagtcatggcgttgggcacgtcctcgtgggtctcgaagcagcacttggagatgccggggccgacggcggccaggatgtccagccggtcgcagccgtagcagtccaccatgcgctccaccgccttggcggcgatgcccagggcggtgccccgccagccggcgtggaccgcccccaccacccggcgcaccgggtcatagagcaggatgggcaggcagtcggcggagtagaccgccagcgtcacaccggggatgtcggtgacaaggccatccgcctgccagggctccggctcgtccaggccgatgcccagatccgccgcggtgacggtgcgcaccgtgtcgccgtgaacctggctggcgcagacaatgttccccatgtccgccccaatggcggcgcagaagcggcggtagttctcccgtacccggtcgggagcgtcgccccggttcatgcccaggttgagggtggcgtagatcccctccgataccccgcccaggcgggtggagaagccgtgtgccacaccgccggcggcctcaaagccgtcggcggtgagatacaccaggccatttttgttgtgctcgatgatattcatggatttcctccatctggaaatcgaaatcggtttttccggaaactcgcgtttcgaaaaacacctcgacccgcgccgcgggcacgaagccgggggtatcaaaaccgctgtgccgcaaagcggcacggcggttttgtatctaggggccggaggcgcttccggtcaaacgccagcgaagccacattccgcttttggataccccatagactgcttttactcgtcctcgtgcatgccgcagcacttcttgtacttcttgccgctgccacaggggcaggggtcgttgcggcccaccttctggcccttcttgacgggctgcttcttaacggtgccgtcgctgcccgcgctctcgccggtgaccttggccacccgctcccgcttgacggtggtggcgcccacctggacccgggccaggaagatgcggcggatggtctcggcctggatggcggcgatcatgctctcaaacatctcgtagccttcctttttataggccaccaccgggtcgttctggccgtaagcccgcaggccgatgccctggcgcagctcctgcatggcgtcgatgttgtccatccagtactcgtccaccacccggagcatcatcacccgctccagctcgcgcatgaggggctcgcccagctcggcctccttgcgggcgtagatgtcgctggcccgctcctggagcagatcggtgagggcctgggcgtcgtactgctggagctcctcgtcggtaaacttgaactcgtcgggccgcaggaacagaccgcggaactgggcgcacacctcccgccagttctcggcgtccatgtgcttgagctcgcccatgtgggcctgcacctcggtggaaatcacggtggagagcatggcctgaacggactccttcaggttctccccgtccagcaccttgcggcgctgctcgtagatgaccttacgctgggtgttcatcacgtcgtcgtactccagtacggtcttgcgggtctggaagttgcgggactccacctgcttctgggcgttctcaatggcgttggagaggatcttcgcgtcgatgggggtgtcctcgtccacgcccagcttctccatcatgcccatgacccgctcggagccgaacaggcgcatgatgtcgtcctccagggacagatagaagcggctctcgcccgggtcgccctgacggccggcacggccgcggagctggttgtcaatgcggcgggactcgtggcgctcggtgcccaggatgaacaggccgcccgcggcccgcacctggtcggcctccgccttgatctcgtccttgtatttggcctccgcctcggcgaacatcttccgggcgttgaggatctcctcgttgtcggtgtcggcgtagccggtggactcggcgatcagctcgtcggagaggccggccttgcgcagctcggccttggccaggtactcggcgttgccgcccagcatgatatcggtgccgcggccggccatgttggtggccacggtgaccgcgcccagcttgccggcctgggcgacgatctcggcctccttctcgtggaacttggcgttgagcacgttgtgcctgatgccccgcttcttgagcatggcggagagctcctccgacttctcgatggagatggtgcccaccagcacgggctggcccttcttgtggcactcctcaatctggttgacaatggcgcggaacttgcccgcctcggtcttgtaaaccacgtcggggtgatccacgcgctgcaccggcttgttggtggggatctccacgatatccagggagtagatggtgccgaactcctcctcctcggtcatggcggtgccggtcatgccggagagcttgccgtacaggcggaagtagttctggaaggtgatggtggccagggtcttggactcccgggccacggtgacgccctccttggcctcgatggcctggtgcaggccctcggagtagcggcggccgtacatgaggcggccggtgaactcgtccacgatgatgacctcgccgtccttgaccacgtagtcgatgtcccggcgcatcaggccccgggcccggatggcctggttgatgtggtgggacagggtggtgttttccggatcggccaggttggccacctggaactgctgctcggccttggcgatgccccgggcggtgagggtgacggtgcgggccttctcgtccaccacgtagtcggcgtccagatcggggtcctcctcctccttggtgtccacgctggccacccgctggcccttgagcttggccacaaaggcgtccactacggtgtagagctgggtggacttgtccccctgaccggagataatgaggggggtgcgggcctcgtcgatgaggatggagtccacctcgtccacgatggcgaaggcgtggccccgctgcaccatctcggtggcgtagatggccatgttgtctcgcaggtagtcgaaaccgaactcgttgttggtgccgtaggtgatgtcggcggcgtaggaggccttgcggtccttgggctggatgtcgtggatcaccaggcccacggtgaggcccaggaagcggtagaccttgcccatccactcgctgtcgcgcttggccaggtagtcgttgacggtgacgatgtgcacgccctctcccgccagggcgttgaggtaggcgggcagggtggccaccagggtcttgccctcgccggtcttcatctcggcgatgcggccctggtggaggatgatgccgccgatgagctgcacccggtagggcttcatgcccagcacgcgccaggccgcctcccggcaggcggcgaaggcctcgggcaggatgtcgtccagactctcgccattggcgatgcgctgcttgaattcgggggtcttggccttgagctgctcgtcggtgagcttggagtactccccgtccagggcttcaatcttgtccacgatgggtttgatggcgcggagctccttctcggagctggtgccaaagagctttttcaacagtcccatgcgtcttgttcacctttcttgttcctgtccccggcgcctcggctcccaggacttggatgctaattcagtttcctagtatatcatatcccatgtcaataaaaaaggggaaattatgaacaaacccagcgttttgcggttttccttcgcgcctgcggcgccagcacgcagggggcgtagatgagggcaccgggcccatagttgttgtccaggccgccgcgcctcccgctgtgattcgtccattataccaaaaaaatacggaaggttacaaattgcttttttccatttacggcccggcaggcagatggtacaataatgttgttcccatcacccagtgtaaaggagcgtaatatgaaaaaacggattgtgctgtccggcctgttggccgcggcgctgaccctgtccctgacggcctgcggcggggacaagatgccggaggagaccccggtgcccacccccatccagacatccacgccggtgcccacccccactcccacgccggcgcctgccgctcccaagtgggggatcaggtctttgccaagacctttacctccggcgacggcgccacggtgctcaccgcctccttcaccctcccgctgatacagaacaccgacgcctgccccgccggggcggccatcaacgagtggtacaaggccgagggggccagccggatgctggaggcagaggaggcctatgagatggcggtggccgactacgacgtgtccaaggcggcggggttccccttctaccctaccacccaggagatgacctaccagatcgcctacgccgacgagaaggtgatcagcgtctgccgggacctgtatgtgtccagcgagggggaggcccaccccgccgtctttctgctcagtgagcagtttgacgccgtgatgggggaaaagctggacttcaccgacttcttcaccgacgccgacgccgtacgggcgcgggtggtggacgccctgttggaccagcggagcgagctggccgcggcggtggagcaggggacgctcacccgggacgccatcaccgccgcggtgcaggtggacaacttttactgcacggcggaggggtatgtgttctggctccagggcggcgccctgcccgccatgaacagcccgctctctgcggtgctgacctatgacgccatgaaggacgtgagtgcggatggataacggcaagccccgggaggggcagctctgccgcctggtgatcgacggctacgccagcgacggcgccggggtggcccggctggacgggatggtggtctttgtccagggcggcatccggggagaggcctgcgacgtgcgccttacccatgtgggccgcagcgccctctggggccgggtggaggaggtggtcaacccctcccccgcccgtatcttcccccggtgcctgcactacaccaagtgcggaggctgccagttccggcacatgaactacgccgaggagctggaggccaagcgcatccgggtggaggacgccctgcgccgcctgggcggggcggagatccacgtctccgccatcctgggggcggagcaggtagaccgctaccgcaacaaggcccagttcccggtggccaagggcccccgcatcggcttctaccgcccccggagccatgacgtaatcgacgtggacgactgcctgctccagggggaggcggccgcccgcctgcggggggccgtgaaggagtggatggcggagtactccatccccgcctacaatgagcgcaccttcaccggcctggtgcgccacgtgtatgtgcgcaccaaccgggccggccgcagcctgtgctgcctgctggtcaatggccggggcgtcccccgggaggtcgagctggtgcgcgccctgcgccgggccgagcccaacctggccggaatcgtgctgggggtgaacgagaagcacaacaacgtgattctgggggactcctaccgcaccctgtggggggaggacttcctgtccgacaccctgtgcggcctcaccttccggctgtccgccccctccttttatcaggtcaacccggcccagaccgaggtgctctacggcaaggccctggagttcgccggcctcaccggggcggagacggtgctggatctctactgcggcatcggcaccatcagcctggtcatggcccggaaggcgggcatggtgtggggggccgaggtggtgccccaggcggtggacgacgccatcgccaacgcccggcgcaaccacattgaaaacgcccgcttcctctgcgccgacgcgggggaggcggcccgctacctggagggggagggggtgcgccccgacgtggtgtgcgtggatccgccccgcaaggggctggccgaggacgtggtggacaccatcgcggacatgggcccggagcgggtggtctacgtctcctgcgatcccggcaccctgggccgggacgtgaagcggttcgccgggcggggctacaccctcaaaaaggccgtggcggtggacatgttcccccgcaccgcgcatgtggaaaccgtggcgcggctggaacggagctgaggccatggcggaggagagacacatctgcgccctgctgcggcagggctgcggcggctgccccctgctggagaccccctatccggagcagctgcgccaaaagcaggcccgggtggaggcgctgctgggggagttcgggccggtgtcccccatcctggggatggagcacccctggcactaccgcaacaaggccatctccaccttctgcaccgggccgggccggcggctggacagcggcatttacgccgcgggcacccaccgggtggtgccggtggcctcctgcctgctccaccaccccgccctggacgaggcggtggaggcggtgcggcaggccgcccggctctgccggtacgagccctaccaggaggaccggggcacggggcttgtccgccatgtgctggtgcgccacagccgcgccaccggacgggtgctggtggccctggtgaccgccgcccctgtcctgcccggggccagggcctttgtctccaaggtgcgggagctctgcccgcgggtggagaccattgtgcagaacatcaatccccgccgctccagcgcggtgctggggccgcgggaaaaggtgctctggggcagggggtacgtcgaggacaccctgtgcggggtgcggttccggctgggggcctccagcttctatcagatcaatccggagcagaccgaggtgctctaccgcaccgccctggacggggcggggctggacggcacccagaccgtggtggacgcctactgcggcgtgggcaccatcggcctggcggcggcggggcgggccaggcgggtgctaggggtggagttcaaccccagcgcggcccggtgcgccgcccagaacgcccgggccaacggcgcgggcaacgcccgcttcctctgcgccgacgccacggcctgcctccagggcatggccgcccggggcgagcgggcggacgtggtgttcctggacccgccccgggccgggagcaccccggagttcctgggtgcggtggaccggatggggccggagcggatcgtctacatctcctgcaacccggagacgcagcggcgggatctccgcctgctggccggatgggggtggagggcccggctgctccagccggtggatctctttccccatacggagcatgtggagtgtgtggcggtgctggccaaaatccgcggaggtggtatgtgaggtacgccgcctccgaagtcaaaacagcatgggagcctggcgcgcaacgtgcggcgccaggctcccattttactttgtatgctacgcttccttcggcggcatggcggtagccacgcctttgatcaccacgtctccgtgctggttggtgcatacggtgtccagcttgacgatattcttttccggaaacagttcctggacggtacaggtcgccgtgacggtgtccccgatatagaccggcttggtgaatttcagctcctggcccagatagatggtgccgggccccggcagcttcatgcccagcactgcggagataaaaccggcccccaggatgccgtgggcaatccggccgccgaactgggtctggctggcggaaacctcgttggtgtgggcgggattgagatcgccggtgatgccggcaaacaggtatacgtccgtctcggtcacggtcttggtcacgctggcgctgtcgcccagcttcatttcccgaataagcattgtttgacctcctgttcctgcgttgttccgcttgagctggggttctgctgcgcaagccccattcgctcctcccggaagatgcggctgtccatagtcgttacatctgtgatgactggtgtgaactccatctggtcaaggatatcgcgctggatgtccacgcccggggcgacctctttgagcgcgacgccctccggtgtgagggcaaacaccgcccgctcagtgatatagaggacgggctggttatgcttgattgcgtagcggcccgcaaaggtcacctgctccacctgcctgaccagctttttgaccttgccctcccggaggagcttcagcgtaccgtctgcggctgagacctccaggccgccggcggtgaaggtaccgcagtagaccaccttcttggcgttctgtgtaatgttgatgaagccgccgcatccggcgatcttcgggccaaatttgctgacgttcacattcccgtccccgtccatttgggccaggccgagaaatgccgtatccagtccgcccccgtcataaaagtcgaattgaaccggctgctccagaatgcagtccacattggtggcggcgccaaaatccatgccgccggccgggacgccgccgacggcacccacctcggttgtgagcaccatgctctccagtccctcctctgccgccacagaggctaccccctccggcatgccgatgcccagattggtcaccgcacagggggtcagttccatggccgcccgccgggcaatgatcttccgcgtacccatcggcagcggggacagagcattcagaggggtgcggatctctccggaaaaggcggggtcatactgggtgccgaaggtctgcatgtggttctccggccgggccaccacaagcgcatccacatagataccggggaggcggatgagccgtgcgtccaggcagccgtaggagaccaccttctccacctggacaatgaccctgccaccggagttatgggcggcctgcgcctgggccagggcctcggcgtagacaccctcccgctcaaaggtacagttgccgcgctcgtcggcataggtcgcgcggataactgcgatatcaatggggaaggcgggataaaagagcttttcctcgccctccagctcaatcagcttgaccatatcgcccgcttcatgggcggcgcggttcatctttccgccctccaggcgggggtccacaaaggtgtccaggccgacatgggtgatcacgccgggccgcttcgcggcgatctcccggaacagcccggagatgaccccctgggggaggttgtaggccgccagcttattctccgccgccagccctcccagcttgggcgccaagccccagtgtccgccgatcaccgttgtgcacatcccgtctacagccaggtggttaagcccccgctcgccgctgtcaccctgtccggacgcatacacgaccctcagccctctcgggtgtccgctgctcctggcggcctcctccagcgcaaccataatctcctccggatgcatcagaccgtttgcaaagccgccgaacgtcacagttgccccatcgtaaaaataggtgtctaccgcttggcgggcggttaatatctttgccatatcgtttcgttccctttctgtaacatagaatggctgttttcctgaaggcaaaagcggaacgggtcggcatccgattgcgcggtgctgacccgttcggaccggtccgttttatgtggactctgagtgatcagatcagcccgatgattgccattgttgcagcgatcagcgccagggcgatgggggtgatcacggtcatgaccagtacgtgagggtaggactccttggtggtcacgccgcagacctgggcctccataacgaaggtgggacagtggggcagcgtgtccatgcccatcgcggccatgccgacgaccttgtagagcgcctggggattgacggtgcccagggacatgaactggtcggccatggtgctgcagaagatctgggtgccgctgagggaggcgccggtaataccggaaaatacgttggttacgatgacggcggagatgtaggggttcattttgtcggcgagcatcatcgcaaagttcatgaagtactggaaaccggcgcaggcattgacgacggacgcaaagcccatcagcgcggcggtcagcagcaggggattgatgctggaggtaaagcctgtaaccaggtcctgaacaatgtggcccttgagatacttataattggtaataattagaacaatagcgcccacgcccatggcggtgttgatgccgtcagaggcgctcatggagttggccagcaccagcttaagcacaataatgacaatatagggcagaatagccaggtgaatggggggcagttccttaccgctggtgcttccggcgatgagttcggcatcgctctcagaggctacaaagccaattccacgggcacgcagggagttggaggcccaggtgaagtagaaaatgccgaagccgaaagccactacaaggagcacaattgccatcgtgggggccgcaaaggtggtgacgcccagcttttcggacaatgcgatgcacagcatagagggggcgcccggggtaacgacattcagaaccacggctccatacaggaagatggcgggcatcaggagttttgagacattggctttgcggaacatgggcacagccacgggatagacggcaaaaataataataaatgcatttacaccgccataggccaaaaggaaggtaataatcagggttccggcgacggtggctttcacgccgaggaaggcgaacagaaaatttgcgatagactcggcggcgccgctctttttcatcagctcgctgtaagccgaaccaatggtgaacagaaacaggtacgagccgaaggtacttccgagggaggccgcgtaggtgccggtcagagtcccccagaacgggagcccgctgcttacaatcacgataaccgagccgaccagggatgccacaaagccgttgacacccttaaaggtcaaatagatcaggactgcaacgccaagaaccatgccaattacgctgatgatctccatacgttttcctctctttcttatccaatgattccgtactgggaggcgctcgcttaacgctaggtcaggacagtaaaagcactatatttccattaaagaataataatggaatttaaagggcggacaagctccggaggtactctggcccgtcccaatttaccaaatcatattccgttcggcctcttctctcagccagtcccggaagtccgggtgggcaattttgaccagggcctcaacccgctccctgatattcagtccccgcagccaggcgataccatactccgtgaccacgtagtcggtgtcgtttctggaagtggtgaccgcggcgccccgcgccaggaaggggacaatttttgagtgcagcacctctttgccgtctgcatctgtggccgaataggtggaatgcattgcaatgatggatttcccgcccggggacatctgcgcgccctgtaccgtctcagactgccctccggtgccggaccactgaaggttgccgacggtttcagaggcgcactgtccggtgaggtcgatctccaggcttgcgttgacggagacaaacttgttgtttctggcaatggtgtagggatcgtttgagaaggtggaggatttaaagagcacggaggggttgttgtggacgaagtcatagagcctctggctgcccatggtgaaggagcacacggaaaaaccgttcataaagcccttctgggagttgtccaccgcgccgcactcaatgagatccaccatggtctcggtaaacatttccgtgtggattcccagatgcctcttgctcttcagctcatttgccacggcgtttgggatgttgccgataccgagctggatggtggagccgtcctctacaagagaggccacaaaggcgccaatttttttgtctacctcggtgtagggcaccagggacttggtggggatagggcggtcggactccacaagggcatccacctcggaaatatgtacctgtgtatcaccaaaggtgcgcggaaagttggggttgacctccagcagaaccagcgcaccctgatcgatcaggtcccgctcatagattgcgctgaccgagagggaaaagtagccgtgggagtccatgggggagaccgtggccagcaccacgggccggcggccctcggcctgcaggcgctgtagagactttcgcagaacggaggtggagctctgaggaacggcgctgaccagcttctttttctgcgcgtcccggagcccggcggtaaagaaccagccgttgtggctcatgatacctgccatctcggggtccttcatcgcatcataatactgaatgggaaggcaggagttcaaagtagtgccttttacccccgtctccttcaaatgctgtagcttggacaggatggcctggggctccgccgcagcctgagcggaaaacatggaatctccgtcctgaataagctccaaagcctgttcagcgctcatttgtttcttcttgtacaattcctgatactggttcacaggataacgctcctttctcgtggggccatgtctggtgcgtgggacagggcgcagaggaagggaatgaaccccgccccacacaccgccttttgaggaatttgtccggttatggggattttgtcttgcctgcttcgacaatttgattatagttgaagggctatggtttgaaaaatacaccttttttatcgccgcatgaattttggttatgcctaaaataatgttgctgttttttgaactttagccccgttttattggaaattatcctatattatagtctgttttttctctctggctagtggcccggcactctttgccgcatcccgtgttccgaaaagaaatttgcgaaaaggcgtcatgtactttataataaaaatacaattcgctcgactgttcgaatggttttttgtgtaggaggaatcatggctttgcggcatcacggcctgcggcggctgagggagtatgtatgaaacgaatgcagctagaatattttgtgcgtattgtggaggagaaaagctttacaaaggccgcagaaaagctctttatcagccagcctgcactgagcaaatcgatccgcgcccttgaggcggagcttggtgtaacgctgttcaagcgcgatccccgcgagctgagcctgaccagcgaaggggaaaacgtctactgttatgcggtggatattttgaattactggcaaagccgtaccgccgagctgttttctttgctggaacaggtaaagggttctctgcggtttgggcttccaccgtcggttgggagcgtttttttttcaaagattctgtttgaatacggctgtaaatatccgcaggttgatttgcagattgtagagggaacctccaaaaagattgaagcactggtcatgaatgatcaggtagacctgggcgtggtgattgagccatacgaaaatccgcatatgaggttaaagaccgtctaccgttctgatgtggtgctggcagtggcgcggaatcaccggcttgcagagcggacagaagtggagattgccgagcttagggatgagccgatgctgatggtctcgaaggactatatgtttcacgaccaggtgcttgcccattgccggcaggcggggtttacgccaaatatcacgtttaccacatcccagtgggaccttttgctggaaatgacggctgaaaaccagggtgtgaccctaattgggcggcctttggtggaaaagctgtacagcggcaggatcaagtgcatctcacttcaaaatccggagtttttgtggacacttggcttaatatcaaaaaaatgtaaaacgctttccggcgctgcaaagagcctttggaatttttgcgatgaagtttgagggggaccagacatcacagccggctgcaaacctgcctgctccatctgaaaaacgccggggacagaactgtaccgcacagtcctgtccccggcgttttagaacattctatatgtgagggccttccgtacgaggctccggagggcctattccaaatcatatacacaatatgaaggaacgccccgcctcccgttcgggaggcggggcgctctgctggccgggcacgggggacggggggaggacataggataggatgcagagaaaacggcccgacagccgctctgccaaatgctctgaaaaggagaatgccgcgtgtcagaatattgtatgcctccccttggggggtattccaacggagagtgcgccatgaaccgcatcaatgcccagccggagcggcggccctgtgtgtgctccccctgccatccggttccgccctgcccgccaattccaccctgtccgccgactccccctcccattccaggccctaccggcccggttggaccgaccggccctcaggggattccgggaccggacggtcccaccggccctgcgggccccatgggtccccagggcgggacaggtgatccaggccccaccggcccgacggggcccactggcttgacgggtgcgacgggcccaaccggccccaccggcgccgtgggtctgacgggtgcgacaggtcccgcaggcccgacagggcccactggcctgacgggtccgacgggcccaaccggccccaccggcgccgtgggtctgacgggtgcgacaggtcccgcaggcccgacgggacccactggcctgacgggtccgacgggtccgaccggccccaccggcgccgtgggtctcacaggtgcgacaggtcccgcaggcccgacggggcccactggcttgacgggtccgacgggcccgaccggccccaccggcgccgtgggtctgacgggtgcgacaggtcccgcaggcccgacggggcccactggcctgacgggcccgaccggcccaactggcccgaccgggccaagaggcgagacaggcgcagcaggcgccacaggcccgaccggcccgtccgtgaccccggcggccgcagtggcgaacgccaccagcgccacggacgtggtgacacggtttaaccagcttctggaaaacctgcgggcggccgggctgctggggacctgagcacaggcaccaaaaaaacgccgcgggcggcgctgctgcgccgcccgcggcgttcctataacggggtttggtttgtgaagattgtggtttatgccatctgcaaaaacgaggccggatatgcagagcgctggatggcctccatggcggaggcagacggggtgtatgtgctggacaccggctccaccgacgggaccgcggagcgcctgcgtgccctgggggcggtggttgtggaagagagggtggagccctggcggtttgacacggcccgcaaccgctctttggagctggtaccggaggacgcggacatctgtgtgtgtaccgatctggatgaggtgtttcacccgggctggcgggcggcgctggaggcggcctggacggacgggaccacccaggcggtctaccgctatacctggaacttcaacgccgacggctccgagggcaccgtgttctggattgagaagatccacgcccgccggggataccgctggacccacccggttcacgaggtgttggagcggcaggagggctggggaccggggcggaagtgcacggcggagggggtgcagttggaccaccacgccgaccccgccaaatcccgggggcagtacctgcccctgctggagctatcggtggcggaggccccggaggacgaccgcaacacccattacctgggccgggagtacctgttctacggccggtgggacgactgtatccgcacgctggagcgccacctgtccctgcccaccgccgtctgggcggatgagcggtgcgcctccatgcggtttctcgcccgggcgtggcggcagaagggccggtcggagcaggcccggcggtggctgtggcgggccatcggggaggcccctcacctgcgggagccctacctggagctggcgcgcctgctctatgaggaggcggagtgggacggggtggtgtacctgtgccgtcaggccctggcaattaccgaccgccctcagacctatatctgcgaggcggaggcgtgggggagcctgccctgggatctgctctctctggggctgtaccacaccgggcggcgggccgaggccctggaggccgcccggcaggccctggccctgtctccggaggatgggcgcatccgggacaacgtggcattcctggcgggctagctctcccgggccgccgtccggcggcgggacagcgcgtccagaagccagggccataccagtgcaaagaaaagaccaaacagactgcccagcacgttgttgcacacccggatggcggccgcggggccgggaccgaagagggcgctggcggtgagcagggcgcccagacagttgaacacggtgcagaagccgtagctggcgcacaggcccaggcagagccccgacaggatgcccaggccgccgtggagggcgggcgggcagagctgatagagcaggcagaacagcagggagccgcccagcacgccgcccacccggcctgccgcccgccggacggggtgggacccgtaggcggtgagaatggagctgcacgagaagcccacccacatgatgcggggcaggcccagcagctccccagtgagcaccgccaggctgatgcccacggccacccggagctgccagcggcacttttcatcggcgagggaaaaggcgcggagtaccgcccggaaggggcgctccggtgtcctgccccggtggttatggtagagcaccgcggcgcacagggcgaagcccagcagcatctccagcccccgcagggcgagcgagcgcccgctgaccggatttccatacaggaaaagatagctgaacaggtagagggaggcgttgcccagctcgggctggtcggcggtgatgagcagcagcactccgatacagaacaggttgagaagcaggtggagcagggggccgcccagaggggccagggcgggcccaagagtgagcaggacgaaggcagccgccatgttccgcagggtgtcggccatgcggtagttgtaatggacaaagcggcagctgagcagcagacagaaaatgaccaccgccgcggggctgttggtcccaccgaacagggcggtgagggcggagataaacaccaccgcaaaccccacacaggcggcgtcccgggccagcagggccaggagaagccgcctgcgctcggccccggcggcctggcggagcaggcccttgagctggggcacccccaactgcatcagtccatagaagggcacggctccccaccccctttcacggccgcggcgtccaggcggcggttggcctgggtgatctcctccatcagccgggtgaactccgcctcccccagcccctcccgcatccggtagaggggggagagatacgccctgcacccgtcctggagggcctgccgtcccgcctgggtgagagacagggtatagctgcgccggtcggtgggggagggggcggccgccaccagcgcccgcacccgcaggccccggatgaggcggctgacgttcacctgctgtaagcccatgctccggctcaggcccaggggggtcaccggctcctccgccatccacaggcgggcaagcagctccagctccgacccggtcaggggcaggcgctggtggacggcagcccgccgggccaactgccgtagctgctgcatatactctgacatttgaacccaatccggtttcacaaaatcgtcctccatatacttatctataatatatattattgataagtatattactccgccaggcgcatcctgtcaagagcgccctgcgcattgacattcccgcggagaaaatagtataataaaaaatacgtaccggggcatggccccgttgggagagaaggatacagggggcggagcgcatatgagcgataccaatgataaaattcggattgtgcaggagacggtggcgggcaaggagatcacctttgcccacgtcatcggcgggccggcccccatcatctatcagaagctgggcctgaacccggccatcgactacggcgccgccgccatcggcatcatgaacatgaccccgccggagtcggcggtgatcgccgccgacatcgcagtgaagagcggcgacgtatacctgggctttgccgaccgctttaccggcacggtcatcatcacgggcgagctggcggatgtcacctctgccctgacggagattgtaaactacttccgcgatgagctggggtatgtggtgtgcaggatcaccaagcggtaagaggcgcggcgatggggaagcgtatgacacgggaggagttcctggaggcggtattctcccggcggtatgaggaactcaagggcagggagctgcgtacggtccgggtccgggtggtgggcaaggagctctctctggcccagctcatcggcgtgacagaccggcgggtctatgaaaacctggggctgcacatcggcacccatctgggggaggatcacaccggccagtccatcggcctgctgcacctgaccccgtgggaggccacggtggtggccgccgacgtggccatgaagagcggaaatgtagagctgggtttcctggaccggttcagcggcgcggtgatccttttgggcagccgggcggaggtcaagagcgccctggagcatgtggtggaattttttcggacggagctgggcttcaccgtctgtgaaattacggagcggtgacaaagagagatgaagaagttatttctgatgggccggagcgaggcgggcaagacctccctgacccagattttatcgggcgaggagctgcactaccacaagacccagtacaccaacacggggacggacatcattgactcgccgggggagtattcggagaccaagcggtgcgggctggggctggcctgcttctcctttgaggcggacgtcctggccctgctgatggcggctgacgagcccttcagcgtttttgaagccaactgccagtgcttcaccaaccggccgctcatcggcatcatcacgaagattgactccccctacgccaacgtgcccatggtgcgcaactggatggtcaactccggctgtgagcggatcttcgaggtgagcaaccttaccagggagggcattcaggagctgctggactatttgcaggaggaccctgtcaggctgacgctggagcaggccaaggcgcggcagcgcctcggcctgacggagtgggaggacgcctcccgcttcgggctggcctgaccgccccggagcggagactgccccgcagggcggttcggagcgccgccgccgctttgcgtcggcgcttggcgcggggatgaaccgtcagggttccctttcatgccggatcaaacgacttttagaaacggttttaaagatttaaacagtcttccagcctgtcgaaaagagggcttcggcaggctgagggccgcgcccatggcgcggcccgtttgcgcgttttggggcggatgcgcatccccttctggacaggccgcttatttcgtgttaggattacgtgaagaacattccgcccgaattttgtcgggcaatccgcaactttttgcaggctgcccgcgtctgtacgttggcacggaaaggaggcccaaatgcgcctgttgttcaagcagcggtttctctcctggtttgacagctatgacatctatgacgaggaggggcgcaccgcctataccgtggagggcaagctgtcctggggacaccggctggagatctacggcccggccggagaccacctggggacggtaaaggaagaagtgctgaccctcctgccccggttcgccctctatgcgggggaggaatacctggggtgcatccgcaaggaatttgccctgtttcacccccggtttacactggactgcaacggctggtaggtggagggcagctttctggagtgggactacgccgtcaccgacccggcggggcgcacggtgatggccgcgtccaaggagctgctccactggaccgacacctatgtgctggacatcgcccggccggaggacgccctgctgtgcctgatgatcgtactggccatcgacgcggccaagtgctccgccggaaacggctgaaccggccgccggaggaacttggcgcggctaaatcccggcctgtgtggaatagtagctgtaccacacaaggaatcggggtatgctgctatgctggaatccgccgctgtccgcgcgctgttgctgtccctggccgccgggctgtccaccctgctgggggcgctggtggtctttgccgcccggagaaggagtgaaaagctgctggcggtctccctcggctttgccgggggtgtgatgctggcggtgtccttcaccgacctgttccccacggcgcgggagcacctgactgcatccctgggcggccgcccgggggcgctggcggcggtgctgtccctggccgcgggcatcggctgcgccgccgccctggaccacctggttccccacgacgcctttgacgccgacaccggcgaggccccacacaaaaacctgttccgggtgggctttgtgtcggcgctggccatggccctgcacaactttccagagggcgtggccaccttcctggcggggtatgaggatctgaccctgggggtgagcatcaccctggccatcgccctgcacaacatcccggagggtatttcggtggccatgcccgtgtggtacgccaccggaagccggcggcgggccttccgctgcaccctgctctccggcctgacggagccggtgggggcggtgctggcctttgcgctgctgcgtccctttctcaacgggctgctgctgggggtgctgttcggcgcggtggccgggatcatggtctatatcgcggtggaagagctcatcccctcctcccggcagtacggccacgaccggccggccctgtgggccacgctgtgcggcatctgcgtgatgccgctgacccatttatttcaaacctgaaaaggcgggtgtatcccacattggagctcgactacaacaagctgctggacatggtcagtgagatgggctaccggctcatgaagagcggtgcggagatctaccgggtggaggagtccattcagcggcttctccaggcctacggtgccccacggggggaggtctttgccattcccaactgcctgatggtcagcctgacctcccccgacggccggcccgtgacccagatccgccggatgccaacccacggcaccgacatctacctgctggagaagtacaacggcctgtgccgccgcctgtgccgggagacccccgcctttgaagaggcgctggagcagatggaggccattacccgcacccaccgggtctactccctgcccacccaactggctgcccacttcctgggctgcggcatgttctccctgttctacggcggaaccccggccgacgggctgtgcggagggctgtgcggcatggtcatcggcctttgtatggcgctgatgacccggctgggcgccaacctgttcttccgtaccatcgctggcggcgcggcctccgccctggcggccgtggcgctcacccggcttggggtggggcagaaccaggacctcatcatcatcggcgcgctgatggccctggtgcccggcatcgccatgaccaacgccatgcgggacatcatggccggcgatatggtggcgggcatcagcaaggcggcggaggcgctgctcatcggcgcggccatcgctctgggcaccgccctggccctgggcctgacccggatggtgacgggaggcgcgctatgagagaggtccttctttatctcctgccctgtgtctacgccttcctggcctgcatcggcttttccatgctgttcaacatccacggcgccggcatgctcatctgcgccggcggcggggccctgggctggctgtgctacctgctcaccgggccgctggtgggcaacgatattatccagtccttttttgccgccctggtcatctcggcctggtcggaggtgatggcccggctgcgcaagtgcccggtgaccagctacctgctggtggccctctttcccctggtgccaggcggcggcatctactacaccatggaacacgccctgaacggcgacaccgagctgtttctggacacactgatgcatacactgggcctagcgggcgcgctggccgtgggcgtgctgctggtggcctccgtagtccgcctgttcaccacctaccagtcccgccgccggggctgagagaggagagataccatgccccgctatgaggttgtcctgtttgacgcggatcatactctgtttgactttgaccgggccgagcgtgaggccctccgccagacgctggaggaggcgggactgcccgccgacggggagaccgaggcgcgctacttatccatcaaccgggcgctctggaaccggctggaccggggcgaggtgcgccgggagtggctggtggtagagcggtttgccgccctgctgcgggccctgggccggacgggagatgccgcggccctcaaccgggcctacctggaccacctgggggagggctcctacctcctgccgggggctcaggcgctgtgccgcgccctggccccccgctgcaccctggccattgtcaccaacggcgtggcccgcgcccagcgccgccgcttcgaggcatcccccctgaacggcctcatcccctggctgtttatttcggaggagctgggggccagcaagccagaccccgccttttttgccccggtgctccgtacactggggaatccagacccccgccgggtgctgatggtgggggacaacctcctggccgatatccaggggggcatccaggccgggctggacacggcttggtacaatccgggccggctgcccggcgaccccgccatcgtccccacctgggaggtggacggatacgcggcgctccaagcgctaattctcaaagaagaaaaaaacaatatttaatcgaggtgtcccagttgccatcccaatatcagcccaaacgggcgcaaaacaggccgcgcaggcacaatccgctgcctctgctggcggcggccgcggcggtgtgcctcggcctgatcctgatcccatctctgggccgtgccccagaggagcccaccgccgcagcgagcccgcctgcggcggccactcccaccccgacagccgcacccacgccggagcccacacccacgccggagccgacccctgcggcctttgatttcacccagcccgcccctgccgccgaggcggtggagatggattactttgccgatgcactgtttataggcgactcccgcaccgacggcctgcgcctctacagcggcattaagggggcggacttttactgctacaagggactgaccgtgttcgagatggacgaccgcgccgtggtggagctggacggcggcaagtacacggtggagcaggccctggagaaggggccccaatacgccaaaatctacatatccctgggcatcaatgaactgggatattttaatgatgaggcgttccaccagacctttggtgatttcctgaagcaggttaaggccagtcagcccggcgcggtggtctatctggaaaatctggtgccggtgaacgcggagaagtgcgccgccaacaagcagccttactatgtgaataacgaccgggtggccgcctacaacgccatttttccccagttggctgaggagtaccaggtagtgctcctggacgtggcagacgccctcaccgacgaaaacggtattctccccgccgacgccaccgtggatggggtacactttaccaaggcatggtaccagaagtggctggcctacctgatggagcacaccgtggatgcggactgctatgcggcgggccagaccgccgcggaaggagcgaatgaaacatgaaatccctgttgatccgcctgatgccggcggccctgctgtgcctggccctcaccgcctgcggaggcggcggggcggtgggccagaccccctatgacccggagacggccgcccaggccctgctggactccggcgcgttcagcgatgccttggacaccgtagaccaggacaccgccgccgccctgtacggaattgatgctgacaccatcaccggcagcgccgtctacacctccctgtccgccggggcggaggagattgcagtgctggtgctcaccgatgaggacgcggcagcggccgccctggatgggctggaggccagggtagccgaccagaaggctgtgctggagagctaccagcccgacgaggtctccaagctggacagcgccattgtggagcagcggggcaactccgtcctgctggccgtggccgccgatgctgaaaaagcccgggccgccctggacgggctggagtaacctgcgttcccccaaaaaaagtgccgggtaccggcactttttttcaaactttttgggctggtgccgcgtctaagcaacagaagcaggaaggagcgcccggaccttggaacagactgtccgccagcagttgagcgactatattgtggctcaccaggaggaattttaccgcctggcgtacagctatgtcaaaaaccgggatgcggcgctggacgtggtgcaggagagcattgtcaaggctctggccaagtcggatacattgcgcaggccggagtatctcaaagcctggttttaccgcatcctgctcaacgagagtatgaatcaccaccgccgcgccaaacggctggtacccctggaggacaccctgctggagaccccggcgcccgcccgggaccccggggagaggctggatctctatgacgccatcgagcgcctggactggaaggagcagaccgtggtgcgactgcgctttttcgaggacatgaagctggaggagattgcgcgggtgaccaacaccaacttgaacaccgtgaaatccaggctctataagagcctgcgccgtctgcgggagctgacagaggaggagtgctgatatgccggatatgtgggaacgggccagggtgcgccatgagagcacgccggtgccggaggagctggaatttgccgtagcctctgccttgcgggcgggccagcggcggctgcggggccgccgggcgcttcgccggagcgtgagcggggtgctggcgggctgcgcctgctttgtgctgctggtcaacgccagtccggccttcgcccgggcggtgtccgacgtgccggtgctgggcggtctggcccgggtggtcaccgtcacggagtaccacatcgacgagcgggagcgccttatcgacgtgcgcctgcccgccctggagctgcccggggacaccgacctggagcagcgtattaacctggccattcagacccgcatcgaccaggtgcttcaggaggccgaggaccgggcgcgggccatccgcgacgcctatgtggccaccggcggtgcggaggaggacttcatccccgtcatgatcgatgttgactacgagatcaagtgtcagaacgaccattatctgtcttttgtgctcaccgagacggaaacccgggccaatgcatacaccgagctttatacctataacattgacctccaggccgggcgggagctcaccctccgggatatgctggggccggactataaggaactggccaacgaggccgtgcgggcgggcatcgccgcccaggaggcggagagccccgacaacatctacttccacggggaggagggggtggagggcttcacctccatcgccgatgaccagcgcttttatatcaatgaggcgggcaatccggtattgatttttgagaagtatgagattgcccccggctacatgggccagccggaatttgaggtgcccatgcccgggtaaccggatgggccgccggagcgccgtgcgcgggagctgtatcagctcccgcgcattttttattcctgcgtgccggcacagacagggaaaaagacgctgtgtataaaattgcagaaaaataggcctgtgttggaaaggatatgagattggaccgtaaaacagcggtttatccaaaggaaaagggagaagaaagccgcctggttatgcatatttatgcttgacaaatggggcttgcagtggtatcttttatacataaatattcgaaaacatacgaatattatacactgtaagaggaaagagtaaggtgaagagcatgaagaagcacaaaacactcggcaacgcgctgtccatgctgacggcatcggcgctgctcctgtccctgtgcgtcatcccgtctgcggccgcagacagcgcagcggcccccgccgctgtgtttgagaacaccagcggtgacggcgggagcaacggcatctccctgtccgccgagcggaccttccaggccagcatcccggtggacatgaccgaggccgaggccaaggaggccgcctcctctgtgacctggaccctgacgcccgatgcggacgcgccggattacttggacgatacccagtttcccaaccagaccgagggcggtcccctgagcgactggctgtgccaggacggcgagacccccttctttaccgacgtggccaccgccgccgagacggtggacggccaggtgtacctgaccgtcaccttcgccaaccagtgctacttcggtgacgatctcagcgtgccccacagcaacggcggctcctatatggatgtgtgcggttgcttcacgctgtccgccgggctggacggcaagaccctgggctctgtggatctgaaggtggcaccctacgacaacttccacaccatgtcggagatctatgacgagctggacgcgctggtggactacgccgccggccacaccgacctctacgtggagcagttctccatgggccagagccagggcgacaacggcctggaaagcctggatatgccttatctgattgtggccaaggacaaggccgcggtggataagtggcaggagatcaaggcggaggcggagagcgaccccaccgctctgctgaagaagctggagagcggcgccttgggcgactaccaggtgcccgtcatgtactccaatattcacgccaatgaggtggccgccagcgacggcatcctggcctttgcctggatgctggtggagaccgcggcctctgagagcggcaccatcgactacgacaagctcaccggcttcaccgccgccggtaaggccgagctggccgagcagatgggccctgcgggtgagaagggctccgtggccgtccccgatctggtggccgatgacgccacctacctgggctacatcaaaggcgagaacgccgacggcaccaccgcctccatctccacccaggtggagctggagaaatactacaccattgacactgtgacggtggacgtggacgagctgctctccgacgtgttcttcatcatcgtccccgaggagaacgtggagggccggacctacctgacccgtacctcctccggcggctttgacctcaaccgggacaactcctttcagacccaggccgagacccagaacatggccaggctgatcgccgagtggaaccctgtcagcctcaccgagttccacggccgggtgcaggccttccagtgcgagccctgcgatcccccccacgagcccaactttgagtacgatctgctggccgagcacctgatgggcggcggcgaggccctgggcatcgccgcggtggccaacaacggcggccacaacagctacgtcatcccccagcgggactacctgacctacaccggggcgaagaccgccgacggggacgaccagacccagtggctcgacccctgggacgacatgtccaccagctacaccccccagtacgccatgctccacggcaccgtctcctacactgtggaggtgcccgcctatgacgactacatggtgcagggcgtcgcctacggccagctgggccagtccgtctacatcgccgagcacaaggacggctacctgaccaaccagaccaagatcttcgagcggggcgtgaccaacgccaactccgacgcctacgagctggtgggccagtggttctgcgaccagtacgacgtggagggcgcggaggccgacctcttccggcctgagtacgacggggagggccagaacggcaacttctaccccgagtgctatatcattcccatggacggcgtccaccagtccaacctccaggccgccgccgagatgatggagtacctgacccgcaacggcgtccaggtcagcctcaccgaccagagcttcacctacaacggcgtggagtaccccgccggtaccctgatcgtgtccatgtaccaggccaagcggagcgtggccaacggcgtgctgtacgacggcaccgtgattaccggctggcccgtcctctactccgagggcatcaccgccttcgacaaggtgcggggcttcgacatggtggtgtgcgccgagcccgccgcctataagaccatctccgccgcctgcggcgacgtcctggactacgaggagaccctggattacgtggcctccctgacctcctccttctccggcgtgaaggacgcccaggtggtgctcatgaacgcctccgaggactccaccgccgccgtcaacgccctgctgaaggccggcaagtccgtctccctcatcaccgagggccagtacgagggcagcttcctggtgtcctacgccgactggcagagcgtggcgggcgactacctgctctccggcgtgggcgtgaccgacgcccccgcggccctggccatccccaaggcccccgtggtctacatctccggcaagcccgccgacaacgacaagggcttcgtcaagaccacccttgtcagcggttcctacgagtacaactacgaccggcaggccatgcgcaccctgggcttcaccgtcaccgacgacgcctcccaggccgacctgatcatcggcgcggccgccctggacgagcaggccctggccgccgtcaagagcggcaccccctacatcggctacggctccaaggccatgaagtccgccgtctccctctttgacgagggcgcgctggtgcgggagaccgtcagccccaacgccatggacgccctggcctacgtcacctaccccaccgacagcctgatcaccgccagctatgtggccgagggcgacgacctcctctacggctacggcgccggctacttcgccgccatccccgccggcgcccaggtgctggtgcagctggacggctccaaggagctgctggagggcttcctccccgccgacggcgagcacttcgacgacttcctggacgactccatccaggccatctcctaccagggcgcgggcgcggacaacgcccaactggacgtggtgctcttcgccaacaccctgaccaacaagaccaaccagcgggatgagtacaacttcatctccaacgccgcctgggccgccgtgctgaacgacaccggctactccgacgtggcccccaacgcctggtacgccgaggccgtggccgccgtcaccgggcagggcctgatgaacggcgtcacctccaaggccttcggccctgacgtgactaccacccggggcatgctggtcaccgtcctccaccgcatggcgggcgagcccgccgcctccgcctctgccggctttgccgacgtggccgccggctcctactgcgccgctgccgtggattgggcctatgaggccggaatcacctccggcgccagcagcaccggcttcgcccccgacagcgccctgacccgggagcaggccgtcaccctgttgtgcaactacgccgaggcccagggcctggacgtgagcgcggccgccgacctgtccggctaccccgacgcctccgccgtgtccgccttcgcacaggacgccgtggcctgggcggtggacgccgggctgctcaccggcaccggcgcgggcaccctgaacccccagggcactgccacccgggccgagctggccgccttgctggtgcgggccgaggccctctttaccgccgaataacctccacataggctgggccgggacagcgttgctgtcccggcccaggaggctatcgataaatcctcctattaaagaattcggagggaaggatagtgtgaaagggaaccgtcagggttccctttcgcgttggatcaaacaactttttgaacctttttgaaggttcaaaaagttcagcagcctgtcgaaaagacttttcgacaggctgctgtcccggcccggttgttttgcccgccggtttgtgctatgctggggacaggaaacgcaaagggggatatttatgcacaaccagaatgaggcctttctccacctgaacgacgccctgcccgccgacatcgcccgccgcagggatatgggggatctggcgggggcgctccggctgatcgacgcccggctctcctccggcgtccagcccctgctggccccccggctggaggcggagcggctgcggctgacccgcctgccctacgactacccctacacccgccccgaggcggtggccctggtacgggcggagtggcccggctttaccgaggcgcagttcgacgccctgctggacggcgggcgcatcgactggcggatggtggacggggagctgcgggtacaccgggagttcctggagtccctgcgcatctacccgaaggaggcaccggggcttgtccacgaggcggtggacaacgcggagcgggatgccgtgctggcccggatggagcgggaaggctccctcaccgcccgcattaccctgaaggcggatatccgggcgctggtgcctgttgcgggccaggaggtgcaggcgtggctgcccctcccggcggcctgcccccagcagagcaatattgagctgctggactgcacccccggcggggtggccgcgccggagtatgcaccacagcgcaccatgtggtggaaaacaaacggcgtgggggagttctccgtcacctaccgttacctcttccgggcggagtacacggctcccatgtccctctctctggagctggcgcagccggactttgacctggaggagcagccgccccacatcgtctttaccccctacctgcgggcgctggcggcccggctgaccgaggggtgcgccaacccggcggaaaaggcgaaggccatctacgactacgtcaccggacaggtggactaccgctatcagcccgcctacctccagctggactgcatcgccgaccagtgcgccaagaccctccggggggactgcggggtgttcgccctgctcttcatcaccctgtgccgtatcgcgggcatccccgcccggtggcagagcgggctggccgtccggcccggccgggtgggcccccacgactgggccatgttctacctggccccccacggctggctgtgggcggactgctccttcggctcctccgcccgccgcagcggggaggacgcccgccgggcccactacttcggcagcctggacccctggcggatggtagccaattccgccttccaggcccccctgacgccccccatgcccgcctggcggcaagacccctacgacaaccagtgcggcgagctgatggtgggcggccgcgggctggacgcccccgagcgggcgtggggccacgagctgctggatttcaccctgctgtaacggaactatatgcaaaaagcgcctctggaatattccagaggcgctttgtatgtttgaaaaagtgtacgtttacaaatgaaatagtcgcactacctagtgtgaagtatagcacagaaatacggcgatatcaattacattttaacatagattttcctgcatttccaccattttaaaaggtacacttttccaaaagggggtggtttgccggccaatgctgtctcacctggccggagacccgcgcttcctgttttaagatgttttgtatgcagtccgaatggcatcctgcgggaacctccggtacggcggagtggtattgacacacattttctgcggccacgacccctgacatcaaaaaggaggaaaacagaatcatggagaaacgcatcttgtcggtgtgcctgacggcgtgcatgctgctgacgctgatgccgtccgcctttgcggcggacgtggagcagccccttcccatcgccggaatggaacagacggaggaaacaagcgcggacgccaggacggagcccggcgacgagccacaggagcccgtacccacagaggagggaaagggcacgcaggaggagcccttcactacggtagccgcctataatgaggcggtgaagggcgacgctctcgacggtaaggacgtatacctgactatcagcagaacggagtttaaggagggacagtttgccctgaccaatgtgcagacgcgccccaatccccccagactgcacctgaccctgacggactgtacctttaccggcaataccgccggagacaagacaaactcctcgtttatgtatttgcccaactgccagtctctggtgattaaaggctgcaccttcaacgccggagaggacggcctgaagtacggaatcaactggaacctctgcggcatccagggttccacggtggagatccggggctgtacctttacgggcagctatgagaagaatgccatcaagctgaaccagcgcaacggcgaggacgacgtggcaacagatgtgaagccgtcgggagacggagaagtaaaacccgccaccattgcctccgctgtggttgcggactgcaccttctccgagggggccaagattcaactgggttcccaggggaagggagagaacaatgccgccgcgccctccaccggcgcgttcccggtgaccatctccaatgtgaaggccgaaaatggcagcgaggttgcggttgagctggcctatcaggcggccaaggatgcggacatccccaccatcacgctggcccctggggacacctttgaaaagacgcaagaaggcgtccttgtggcacaggttggggaggagaaattcacctcttttgataatgctctgaccgccgcgctggccgcagaagatcacaccctcaccctgctgcaggatgtgacaaaagacatttccatcacagcgggcagcaccctcaccattgagggcagcggcaagaccctgtacggcgccatcaactgtgtggcagcttcgggcgacgatgccaaccagaccaacacgaacctcaccttgaataatctgaccgtggacggcgacaccaacagagatggaacggcggataaatccatcctcattacctctcagaatcagagcgcaactgttgtcagcggtctgaacctgactatgaccaactgcaccgtgcaaaactccaaggcaggagtgagcggtggacagggcatgtatctgaccaacgcgaaaaacctgactattgacggctgcacctttacaaactgcggcggcattaactatgccatcgacctgaacctggtcgccgtacaggatgccatgatctcgatcaccaacactaggtttgaaggaaattgcggtgcttccggccccattaaagtcgctgaacgcggcacgggtgacgggactgaagccgatgatatcaccggcgcgcgggccagtgtcaagtccctgactatttccggttgtacttttaacaattcgaatccaattttgggcggcgatattgttcttggggtaacaacaaagacgggcgaaaaggacggaaatgataccggctccttccctgttaccattgcggacaacaagactaccaaagaagacaagcagctgaagatcaaactggcctacacagatgactcggccagggatattactacggacattggcagtgcggtggtaggtgatggaacaacagaccccgcgcagggctttaccatcaccgccaccgccggcgaaggcggcgccatcactcccagcggcagggtggccgtagccaatggcggcagtcagaccttcaccgtcaccgccgacagcggatattccatctctgatgtgaccgtcgatgacagcaccgccgcagccgtggtgcagaacgataacggcacctacaccgttcagaatgtgacaaaggactgcatcgtccatgcgacgttctccaaaaacagctcctccggcggctccttctccagttccacccggtacacggtgagcgtggaggacacggacaacggcagcgtgaaggtaagccccacccgcgcctccagaggcaccaccgtgaccatcaccgtgaagcccgacgagggctatgagctggacaagctgaccgtcaccggcaaggatggcgattccatcaagctcaccgacaagggcgacggcaaatataccttcaaaatgcccgcttccaaggtggaggtcgaggcggtcttcaccgcgatcgaaaccgagccggaacagcccgaatccctgcccttcaccgacgtggcggcggacgcgtggtatgccggcgcggtgaactgggcggcggcccaggggattgtggccgggtatgacaccggggccttcggtccggcggacgccctgtgctgggccgtgggcgagggtctgctgaccggaaaggacggcggccggctcgaccccgccggcaccgccacccgcgccgaggtggccgtcatcctcatgcgctttgccgaaaagaagctctaatttaaagcagaaaggcccccggaacccatcaggttccgggggccttccaattatcaggactcttctgcgggcgcgccgggctctgcggcgggcgcggggggagcggcaggctcctccttgttcttgcccaggaagcggggcagctccatgcccgccatgtcgaacatctcgttcatgggcggaatggacttcatcaggccggagacaaagcccgccgtggcggtcttgccgtccttctgctcgccgccgtcccagacggtgaccttgtcgatcttgatgcccttgacggcgtccacctggatgcgcatgagctcctccatcttgtcggccagcatcaggcgcacggcgtggtcggcgtcgccgcccgcggcggccacgatctgccgcaggccgtcggcctgcttgaccaggatctcctgggcaccctgggcctcggcctgcatcttggccaggatggcgtcggcctcgcccttggcgcggcggcggatctgctcggcctcggcctcggcctccagctcccggcggcgcttgtcgatctcggtcttgacgatgacatcggcctcttgggtggccttctcacgctgggcgcgggcggcctcggccttctgctcggcggcgtaggcctcctccagggcctgggctgcggcgatcttctcggcggcggtggcgatgcgggtggcctcggcctccttctcccggcgctgggcgttggacatggccacctccaccttggaggagttctcgccctggatggcggaggcgtcggcctgggccacctggatgcgctggtcgcggcgggcctgggcctcgccaatggagccgtcgcggtccttctcggccacgttcttcttggcgtcgttgatggccttggcggcggcctccttgcccagggcgtcaatgtagccggactcgtcggagatgtcggtgacgttgacgttgatgaggcgcaggccgatcttcttgagctcgccctccacgttgcgggagacggcctccaggaacttatcccggtcggtattgatctcctcgatgtccatggtggcgatgaccaggcggagctgtccgaagatgatgtccttggccagctcctggatctcctggagcttcaggcccagcaggcgctcggcggcgttctgcatgacccccggctcggtggagacgcccacggtgaagcggctggggacgttgatgcggatgttctggcgggacagagcgttttccagatccaccgagatggacatgggggtcagatccaggaactcataggactggatgaccggccagataaaggccgcgccgccgtggatgcacttggcactgcgggtggagccgtccttgttgctgcccaccttgccgtagatgaccatgaccttgtccgaggggcacttcttgtagcgcttgatcaggaacagcagcagggagaagacgatgacgacgatgacgcaggtaaggataagtccaaagatgtttggcataagttcctccttattctgtctcttctgattcggatggaatgggttccaccagcagggcgccgcggccggccagaccggtgacacggacagggctgccggtggggatgggggcgggggagtcggtgagggcctcaaattccgtcaactgctcctgcacggtgagggtgaccttgccgggggaggagcggccggggggaacggtgaggtacacggtgcccgtccgcccgagggcgttgcggagatccaaggtgccgtcgtactggaggcgaagggcctggcggacggccagggcgatgcccaccatgccggcaaagccgatggggatggccaggaagaccgccaggaaaccgggcaggcctacctggtggagccacaggccgccccagccgaagagcaccaggaaggccaccacgccccgcacggtgaacaggtgcaggccggtgtcgggggtctccgggtccgccgcggcctcgtggagcgggccgccgtcggcgtcggggccgtcgaagtccggcccgtccgcgtccggcacaccggcgtcgccgtcgctgtcaaacgcgccccccgcaaagaggagaacggtctgaatcagcaggatcagcgtggcgggtacggcgatgtagagcagaacgtggtccagggcagagagggattgccaccaggctgccatgaatgggttcctcctttctcgaaatggggatgcgatctatcataaaacagcggtgggatactccgcgtccctaccgctgtcttgggacgtgtcaggccagggccgcgaggagggcctccgcctcctgtttgagccgtccggccagataggccgtcaggatcacatggaggcagcgggccacccggtcccgggcgcccgggacacactcgcagtagttctccgccgctgtctggcaccagcgggccgcctcgtccggcccgctgggaggctgatgctccaccagggccgccaggcgtacaatatagagatacaactggaaatcgtcaatcagatcgtccgattcatcgtccagctccccgttgacataggagagcagggcgcagattttgtccagctgcatggaatccttcagcatattgatcaggacgatgcgggaaaactggcggcgggagtaccgcttgcgctccggcggggccacaaagccccggcggacccagttctggatgacatagggctccagcccggtcaggctggccacctgggagagcatcagccccccggccaaaaagagggagttcagcagggtctccgcctcctccggtcggttccagtccaccgcgatggtggttcccggcagcgtctttgccatatcatccactccttttcttgctttgacatgattatactaaataatcatatgattgtcaatggggatttaaagataatttattaagaataaatgacgatttggtaacgctcaccagtccaggggcggggcataggggccgtcaatgaggtaatagggcagtccgcggcggcggcaggcctccagattgcgccggttttccgccaaaagtaattccatggtgcagaaggagtcgtccttccgccgctctatggcgttggcgtgggtctgaatggtgtcaaaccgggtgcggatgtacgcctcactgaacaccagacagagaaagcgtatgtgggggaggcaggacgcatcaaagtcctcccgccagttgaaggggatgtagtagccctccaccgtcagcgactggccgttttccaccgcggttttgacgatctcccgcaccacgggccagaggacggcggcggcgccggaaaattcgccgcaaaatcgggaatgacctctttacaaggcggggagaatatgataaactactacagcctgtaatttacaggcagaatttacccccggcttcgtccccaggctctcaccggccggtcacgcagcccagggcacattgtatgaaaggtggaacccaaccatgatccgtaaggacgagaagacggccgtgatcgaggccaaccgtacccacgccactgacaccggctcccccgaggtgcagatcgccattctgaccgcccgcatccaggagctgaccgagcacctgaaggtgcacatccacgacaaccacagccgccgcggcctgctcaagatggtcggtaagcgccgcaagatgctggactatctgatggccaaggacatcgagcgctaccgcgccattatcgccaagctgggcatccgaaagtaagaagaagcgcggaggcgtgcggagcaggacgacagcgaaacacgcagatgaaaaaacaggttggcggaacgccaacggcatttttcgcggagtgttgagcagttgtccgtcgtgcagccgccgcagcgtgacaacaacgaatcaagaggggtggcgcgggctccgtgccaccccttcttcccatccgtcggagcttgctttttagcagttgaacctgggcctggaggaccggacccggcttcaagtgctaaaagggatcgggctctgatgtgtgggagacaccaatgaaaaggaggaatacccgcatgtcaaccattatcaagcacaaggaattcaccaaccacaaggtctacaagaccgaggtggcgggccgccccctgaccatcgacgtgggcaaggtggccgagctggccaccgcttccgccatggtcacctacggcgagaccaccgtgctggtggccgtcaccgtgtccccccgcccccgggacggcgtggacttcttccccctctccgtggactttgaggagaagctgtacgccgtgggccgcattcccggctccttcatgcgccgggagggccagccctctctgcccgccgtgctggcaagccgcgtgatcgaccgctccatccgccccctgttcccctacgacttccgcaacgacgtggtggtcaccgccaccgtcatgagcgtggaccgggactgctcccccgaggtgaccgccatgatcggcgtgtccgcctgcctggcctactcctgcatcccctgggccggccccatcggttgcctggaggtgggctatgtggacggccagattgtcctcaaccccaccaacgagcagaagcacgcctcccagctcgatctgaccgtggccgccaccgacaagaaggtgatcatgattgaggccggcgccaaggagctgcccgacgacatcatgtacgacgccatcgtggccgcccacgaggacatcaagaagcaggtggccttcatcaaccagatcgtggccgagatcggccgggacaagatgacctacgaccacgccgacttcgaccaggagctgttcgacaagatcgtggaggccaccatggatgaggcccgcgccgccatggacaccgacgacaagaacgtgcgcgaggagcggtggaacaagctcatcgagcactggcatgagctcttcctggaggactatcccgagatggacaagtacctggaggagatcacctacaagttccagaagaagatcgtcaaggcctggctgctggagggccaccgggtggacggccgcgccaagaacgagatccgtcccctggccgccgaggtgggcgtgttgccccgcgtccacggctccggcctgttcacccgcggccagacccaggtgctctccgtctgcaccctgaacaccctctccgccgcccagaagctggacaccatctgggaggaggaggagaagcggtatatgcaccactacaacttccccgcctactccaccggcgaggcccgggccgcccgctctaccaaccgccgcgagaagggccacggcgccctggccgagcgcgccctggagccggtgatcccctccgtggaggacttcccctacgccatccgcgtggtgagcgaggtgctctcctccaacggctccacctcccagggctccatctgcggctccaccctggccctgatggacgccggcgtgcccatctccgcccccgtggccggcatttcctgcggcctgatccaggacgacgacggcggcttcaccaccttcatcgacatccagggcgtggaggacttccacggcgagatggacttcaaggtggccggcaccaaggccggtatcaccgccatccagatggacatcaagaacgacggcctgtcccacgagatcatcaaggaggccctggagatcacccgcgacgcccgctatgccatcctggacgagatcatgctcccctgcatctccaagccccgccccgacgtggccgacaccgcccccaagatggtgaagatgaagatcgacgtggacaagatccgcgaggtcatcggctccggcggcaaggtgatccagaagatctgtgccgacaccggcgccaagatcgacatcgaggacgacggcaccatctacattgccggtaccgacaaggcctcctgcgacgccgccaagaagaccatcgagaccatcgtgttcgtgcccgaggtgggccagctctactacggcaaggtggtccgcatcctccagttcggcgccttcgtcgagctggcccccggcaaggacggcatggtgcacatctccaagctggccgaccgccgggtggagaaggtggaggacgtggtcaacatcggcgacatgatctgggtcaaggtcaccgatatcgacgagaagggccgcgtcaacctctcctaccgggacgccctgaaggagatcaaggccaagaaagaggccggcgagcctatcaagtaaagagcgcatacggcataaaaagggccggacggaaccattccgtccggcccttttgctctgcaagagcatagcaaacttgcccatgcgccgcttgcagcggcacggccataagatgacagcgcgtaggccggtacggcccacatgcgcgaacacttcatgcgcctaagcctttgcatagtttcgcggcgcgtcctgtacgcatggaggttcatgcaaatgatgcggctgcccgctcaggccagcaaaagctgaatgcccaggtcggcaatatagccctgccattcggctgagagctcgtcatccgtaacgatgatgtcaaaatcggagaggtaggcgaaagtcgtgggacagattttgctgaacttggaggagtccagcagcaggatcttggtctggctgctctccatcagggcgctcttggcgttcatctcatggggagccacacaggtgacgttcagcttgccactgatgccggcggtggagaggaaggccttgtttacacaggtgcggttaataaggctgataccctctggactataaaacatccgggtgttgggatagaggtagccgcccgcgcagatcacgtcgtagttcggatgcgtggtcaactgggccagggtgttcatgcagtaggtgagcacggtcaggtggacgccgctgggcagattttgtgtgaggtaggagcaggtggagccggtatcaatggcaatgacatcgttgggttcaatgagggaggcggcttttttgccgatgcgggccttccggtctccaaagtggagaacctcgtaatccagattgtactcgggaagggtactgtgggggttctgggcggcgcgatgaatggccacgccgttgatcagctttaccgtcccctgctgctcgagctgcttcagatcccggcggattgtaatttcagatacccccagctccaccgccagttcgcgaatcgatacgcccgtcttggcgatcaaaagctgggagattttatcaatacgtgtcatctttttgagactcatatggtgcaatcctcccatacttaattaaatactagggagagaatatcataaaaccggaactctggcaagaataaagcaaaaattagttggatattctgtacattttttgtaaagccaaattttaaaaaatgataattcaatgccttttatctctttcggagaagattattgataatatactatcaaataaagagattatatgaaattaaagcttaaaaagcagactgaaaactgtaattttgaacatttgttgacaagaaaaatgatatagaatacaatggagacaataaaaagcaaaataaatgaaaggagctgcgccatggaactgcgattggagcatctggtcaaggatttttccggaaccaaggcggtgaatgatgtcagcattacgattcaggacggcaagctgaccggattgctgggccccagcggctgcggaaagtccacgacactctacctcatctcagggctggagtcgcctacttccggaaggattttctttggagacagggatgtgacggccctgcccccagaaaagcggggcattggtctggtgtttcagaactatgccctctatccccatctgacggtggagcaaaacatcgccttccctctggtcaaccacaaggaggggaaggaggagatccgccgccgtaccctggagatggccagactggtgcagatcgaggatctcctcaagcgcaagccgggccagctctccggcggccagcagcagcgggtggccattgcacgggcgctggtcaagcggcctgatatcctcttgctggacgaacccctttccaatctggacgcccgcctgcgattggagatgcgggaagagattcgccgcatccagactgagacgggcgtcaccaccgtgttcgtcacccatgatcaagaggaggccatgagtatcacagatgagatcgtgctgatgaggaccggcgtggtgcagcagcagtgtccaccccaacagatgtatttgaatcccgccaaccgctttgtggcaggctttctggggaatccccccatcaatttctttcggttggacgtgtgcggcggaacggtgtgtctggcagaggactacatgctccgggtgcacggcgcggcggatgggccggtcctggtgggcatccggcctgaggcgtggcgtctggggcaggggcttcggactgcggctgaggctgtggagatgcggggcaaggatctgctggttaccttctcactggcaggggagcgggcccgcgccattctggacatcaccgccggtgtggcggcaggcgacgccgtggagctgaccctggagcctcgcctggtctatatctttgacccggagaccggcgcacggctggatgcggaggtggcgggatgaggagccccaagccggcccgcgcagaaaatccgctgggcaacacccggcgcagcgccaaggcatatctgtatctgctccctgcctttgcggttttggcggtctttgtggtctaccccatcctcatgacgcttcggatggggttttaccagagttacgtgtaccttaccgacaccggcacgggcttcggcctcaattcattccggtacgtgcttcaggatcccgctttcgggctggccgtgcgcaacaccatgtttattgttctggtgggcgtacctatcacgattgtgctctccctgggggcagccctgctcatcaattccctgcttcggaccaagggactgtttcagacactctattttctcccttatgtcacctccaccctggccatcggcctggtgttccgctggctcttccactcggaatacggctacatcaacttttttctggagtttttggggctggagccacagaagtggctgtccgatcccaacctgaccattgtggcggtgaccatttttaccatctggaacggtatggcgtttaagattgtcctgttcctggccggattgcaaaagatcgaccagcagtactacaaggccgcccggatcgacggcactccagcgcaccggatattcttccgcatcaccatgcccctgctctcccccacgttttggatggtcaccatcgtttcggtcattcatgcctttaagacctacaacgaggtctatgccatgttcagccgggagagcgctgggcctggaaacagcgccatcactatggtctactatatttatgacatgtttttcaaccggggacaggttcactacgcctcggcggcggccatcatctttctggccatcgtactggccctgacggtgattcagaagtgggtctccaagcggtttgtatactatgtataagggagggtcggatatgaaacagaacgtgggcaaggcggtcaagatcgccgttctgactgttggagcctttgtcatgatcttcccgtttttgtggatgctctttacctccctgaaaacactgccggagtccatctccatcccgccaaccctgttccctgcggtgccccagtttgaaaattacacggaggctcttgccgtcgccccctttggcctttatttgcgcaactccattattgtggcgggcggcggtaccctccttaccctggtgcttaccgtgctgtctgcctacggctttaccatttacgaatttcggggcaaaaagctgctgtttctgctttgcctgtccaccatgatgatccccgcagagctgctcatcatccagaacttcatcacgatctccaagctgggctggatggacacctttcagggcattattctgccaacggtggccagcggtttctatatctatatgatgcgggagtattttatgcagatcccctccatcctctacaaagcggccaaggtggacggctgcagcgactggcgctacctctggaaagtcatgatccccatgaacaagaatgccattgccaccattggaattctggcctttatcagccaatggaattcctttgtctggccccttatggtcaccaagagcgatgcccaccgggttatgcccatcggtctgctccacttccgggatgcggtgagctcccaggtgaatctgcagatggccggcgctacgatcgtcattgtacccatgctgattttcttcctggtcttccgaaagcagatcatcgccggcgtggcgcggggcggcatcaagggttaagatcctgcccggcctgccgggctttgaataacacaatgaaagcatatggcacgaaagaaaagaaggaggaattttcgatgaaacggaagctcatcagcgtaagccttgcccttgccctgggcctttccctggcggcctgcggcagcaaaccggcccccagcggggccgaaacccccgccggggaactgggtaccctttccggccctgtggaactccagttctggcactccatctccaatcagaaccacctgaaggttctggaggggctggtggaggagttcaatgaaacgataggagccgagaagggtattaccgtggtcccaacctttaacggcagcagcagtgagctctattccagcgtggtgggcgcgatcaaggcgggcagcgcccctgatgtgaccctggccctgcgcccctatgtggctgactacctccagaccgactatgtggttaacctggagccctatattacagatcccgatgtgggcatgaccgactacgaggacatctttgaagggctgcgggaggcgaactccagctatgccaaggagggtatctattccctgccgatccactcctactccgaggtgctctattacaacaagacgttttttgccgagcacggactcagtgttcccaccacctgggatgagctggtggaaacctgccgcgccatccgagacattaccggcgcgcccgcctttggctgggacaacctggcaggcagctttatgaccctgctgctccaaaacggcggccgctacaccgaccagaacggcaatctgtactttgccaccgaggacagcgacattaccctgaaggtgcttcagatgtggcaggataacgtgaatgagggtatctggcgtactgcgggggaggatcagttcttctccgggccctttgccaatgagatgatccccatgtatatcggcgacagcgtggaggccagctatatcccagacaaaaatcccgagctggactggggaaccgcccctgttcctcaggtgagcgaggataccgccgccaacctgtccgccggccatgtcattatcgccttgaatcaggacgggaatcaggacagaatgtatgcggcctatgaatttatcaagtttatgacctcccatgacgccaacctggcggtagctgccggaaacaccggctatctgcccatacgccagtccgtggcggaggacccggcctatgaggcctatgtggccgacggccacgagtacatgcgggccggtgtagagcagagtgaccgttatttctatgagcccgtgtttaccaatgctaccaccacctccagcgccgtcaacagcgccgtcaagaccatgatgcaggaggtggccgacaacggcatggagccggagctggccctggccaacctgaagcagaccgtcggcgccaactgaagcggacttgggcagggcggagacggagcatccgcctccgccctgccgcggccccgtgtcccggcccgggcgcgcagaaaggaaacctgacatgataccaattttttaccatgacatcgtaactcccagcggacacccgggggacgaggtcatatccgccctccagaaatttattcgccggggggagacggagctggcggtgcgggctgcctatgagctctacctgaccggggaggagctgaccgcctacctgtggagacggttgttggtgatcagtgccgaggacgtgggcctgggggagcccatggccccagtggtggtggatgcccttcaccgaagcagccgggagctctcccgggacagctccgattatcaactgctcttcgtccacgcggtgcgctatctgtgcgcctgccggaaggagcggggctccagcgtgcttgccagtgtggttaagcggcgcatacggcggggagacccctttcccctgcctgattatgtgtatgacatgcacacgctgaccggccaggagcgggggcggaacatcgaccacttcctggccgaggccgcctgtgtccggccgggggtccgggctacggcggaggagctggaggagaccgagcgctgggagcgggagctcgttgcgctgatgaaagaggaagaggcccaacaggaccgtacttaagaaaggaaggaccccatgacaaatcgcaccctagtggtctccattgatgcgctgatcacagcggatatccccgtgctgaagcagcttcccaacctggggcgcgtgatggagcatgcctcctggattacggatatcgaatgtatctatcccaccttaacctatccctgccatgccaccatcgccaccggctgctggccggaccggactggcatcaacaataatgagattccagatttttttgcaaagggacggatggactggtattggtggcgggaggccattcaggtgcctaccgtggtggattttgcaagacaggcggggctgactgcctctaccgtcacctggcccgtcatgtgcgcctcaggagcggagtacaatattggcgagatctgggccccgcaggaggaggatgacccgacaccgtggtttaccagggccaacagccctgcggtggaggagatttttgaggccaataagcacatgctccgctggatgaagacgccacagatggacgagttcgccgccaagtgcgccgccgacatcatccgggcccaccgccccgacctgatgctgctccacctgtcctacgttgaccaccagcgccaccgcctgggcgtgcacggagatctggagcacgccttccgctttattgacggacagatggggcttgtgctggatgcgctggaggagaccggcggcgtggagaacacaaatattgtgctgctgggcgaccacggtcagctctactgcgacgagatgttccatctgaacgccctgttccaccggctgggctggctccagaccgcggaggacggttccctggcagactatcaggtctatgccgccaactgttcgctcagcgcacacatctatctccggccggaggtggaccgggaaatggtgtattgcgtcctgctggagcaacagaagaagtaccccaaatacctggagcggatctttaccaaagaggaggccgcgcagatgcacctgaccggcgattttgactttgtcattgaagccggcgaccgggtgtgctttggaagggccctggatggggagcagcttatcaccagtgtcaacgacataaaggaatataagccatcggtctccacccacggccacctgccctggaagggggacaagccccccttcatcgttgccgggcccaatgctgtatccggcaggataatccacggcgggaggctcattgaccacgcgcccaccatcctccgtctgctggggctggaacccataggaatggacgggcatccggtggatgccctggtgcggccctgatgggaagagggttacaggctgccccggggcttgtctgttttgatctggacggcacgctctaccacgacgaccgtatctacctgcgaatgatcgactactactttgccggtactccatgggagaaggagatcgggtctgtaaaggcggagatgagccgggtgctggcgggaggcaatccggccttccgctgcggccggtttgcccccaaggaatggggggtgtgtcctggcccggccgccgcgctgctggctgtgcccaccgaggccgcactcctgcgtccggacccctcgccctggctggaccggagatgctggtcctatatctccgacggctggagcctggccatgtacctggcccggcgtatcggctgggacggtgaggcgttctgggagcggttccagttggcccggcgggatctgctgaccgacggggtgggcccccaaccggatccggtgctggccgggcggcttctccgcctgcgggaccgcggcatccggcttgtgctgtgctcaaattccaggcgggagggaggagaggcgcttctggcccggctggggctgctggggtgctttgacgagcagatttttgacgcggagaagccccacgccactccgaaacgtatggaagggtggagcgcccgctgggggataccatctgacgcgatgctgtttgtgggggaccagggatacggcgacctgtacgccggcctgcgggccggagcgcgcaccctgcgggtttctccatacccagcggatgatgagggcctttgggatgcctgtatccgcacgcaggaggagctgaaggagctgctggctgcctggtgctgaagccgggcagtccagcccggcgggaggacattctgcatacaggccggacggaggagagcccccgcccggcctgctgtttttcccgcggattttccggctgacaagtgggacggaatgtgatatagtgttgtaacccaaacgagaacaggaaaggagagcgcggccatgaaaaagaaggtggtgggctacctggcgctgatcctggccatcacggcggtggtactgctcctgattgccctgcgcggggcgtaaacggcacggtatttgtccatactaagcgcgaaaatatagagaagtgcgaggttacaatggtttgatgtatgaaaaaaagacgctccccaacggggtgcgtatcctgacggaacatgtgccgggggtgcgctcggtttccctgggcatctgggtggggaccggctcccgccatgagagcgcgggggagaacggggcggcccatttcatcgagcacatgctcttcaagggaacccggagccgcaccgccgcccagttggcggaggagatggacgccgtgggcggccagatcaacgccttcaccaccaaggagtgcacctgcttctatgcccgggtgctggacacccacctaggccgggcggcggacatcctgtgcgacatgttcttccactcccggttcgacgacgccgacgtggagaccgagcggggggtgatcctggaggagatcggcatgtacgaggacaacccggaggatctctgcgccgagcggctggccggggcggtattcaagggctcccccctggcccggcccatcctgggacgaaaggccaccctggacaagatggacggggcgtggctgcgggcgtaccagcgcgcccactaccggcccgaccgcatcgtggtggccctggcgggcagctttaccgatgccgacgccgtggagctggccgggcgctttgccggcctggaggcgcggccccacaccgctgcgagggccgccgcctatgtgcccggggtggtggtgaagaagaaggccatcgagcagaaccacctgaccctggctttccccggcctgtccttcgccgacccccggcggttccagctccagctcctgtcctccatcctggggggcggcatgtcctcccgcctgttccagcaggtgcgggagcagaaggggctttgctactccatctactcctacggcacctgccatgacgataccggctacttcggcgtctacaccgccctggggcgggagaccgagggacaggcgctggacaccattctggccgtgatccgggagctgaccgagcacggcgtcacccaggccgagctggaccgggcccgggagcagtccaaggccaacgtgctcatggggctggagtccacccagtcccacatgagcagcttgggccggggcgagctgctccagggcgaggtgctggacgaggacgccatcatcgctgcctacgacgcggtgacgcgggcggacgtgcaggccctggccggagagctgttccgttttgagaacgcctccctctccgctgtggggcgggtggggagcgccgacgcctaccgggcgctgctgcactgaaatcaagctcaaaacggaggacggccttttgccgccctccgtttttgcacgccttgggaagagaaagggcggatttaaattgaagtttccacaaaaccgtgataggatgtggaaaacaggagggaaaaccaacgggggttcacgggaggaggatggcgatatggagaagaggagatggagaacacggctgatcgttgtggctgttctggcggtcctggtgctggtgttcggccccaagaagctgggctggctggttccggggccggatgaggcggtaacgggctatgccatgtatagactcttttccgtcgacggggcctatgaccccaccgaggaaggggtggaggagctgcgcgccgttctggacgatacctgggtgctctggtggggggtctccaactcaatccccatgaaggacagggaggaccaccccttccggctggagatttacacggaggagcggattcctgcggccaccttctgcctgggttccgacgggctgctgtatgcgggaaagctacgcttccgcccgctgaacgccgacctgcgggcggcgctggagccgttggcggagcaatgggaacaggaacacaaaaatggaggagacggttcacccgcctcctccatttgcaaccgttttatccaatatttggatagcctacggattcatccagccggtattggagtaccgaccaggtgatgtccaccgtctcgtccgggttgtgattgagtttcagcaggtgcgggagcagaaggggctttgctactccatctactcctacggcacctgccatgacaataccggctacttcggcgtctacaccgccctggggcgggagaccgagggacaggcgctggacaccattttggccgtgatccgggagccgaccgagcacggcgtcacccaggccgagttggaccgggcccgggagcagtccaaggccaacgtgcttatggggctggagtccacccagtcccacatgagcagcctgggccggggcgaggtgctggacgagggcgccatcatcgccgcccgccccgcgctttggggcgggcggcttttctgttcccaccctgccttcccctgggggaaggtgccccggaggggcagatgaggggagcgttggcaatcttaaaccaaacttaagggaaatgtaaggaagtttttgtgcagttatgctacgatggcaatgcgggagaggaggttcctgagattcccctcagacggcttcttatcggacttgcagagaatatgcgtggttttccttgtaacacaaaacaaaaagaggcctcagcctgcgcgtagagggaggatttagccggcaaacgtcaaccgaggcattcaatgaaagaagggaaaaatatgaaattaatcaaaagaattactgcatatctattgacctttagcattttattgagcatcggttcgtctgtagtggctgccgcagtggcgcctgtcgagcaggaatatccagcgcatgaagacccgtcacaggaaatgttaactgatctggagcaaaagggggtacaaattaatcacgttaaagattcgagcctaataacaaatatcaagaaccccagcaacggaacgctttcatttacgattaaagttccggcaaaccagacactctactataaggttgaattaattccaagcaaacgtgccggctctatcgagacccccaaaaacgcctcatatcgtaacaactccaataaaacgattacaaaaacgattacaattgatgtgaagcatttttcccctaaatatgtaataactgcaaactatacaactggaaactctaggattaaaacagtttatgaggatagtgataatgcgaccagtacactggtaacagcaattacctctaaggcatttgtctggacacaatcagaattggacaaatacaatactgcacaaacaattggatggtgggtaacttttgggacagtaactgctatttcaatatctcttgttccgctactcggcgttgaaggggtgggggccgggattgctttgtcggttggatgggggtatatttcttctggcggcgtgccatcgacagaatcaccaagtgagtacaaacttgacataacacctaggctgaatatgaaatatcaagtgacgtataagccttccaataatggaatagagagaaaaataaaaattacatcgcctacaggaagagtttcaacttatgacctaggggcttattcgagggacataacaattcgtattcccacataggagcatagtgatatgagaaggcaaaaggtattatttctgctggcaatagcctgctatgtgggtgcggcggcgttcggaaccgcaagactcgccctcccactccggactcagccggagctgttggggacggcatggaggtacttcctgagctgcatggcacttgccgcagccggagggctcctgatgaccctgtcccggaaaaaataatttctcgcatggcaagggcctgtgaacgaaatccgttcacaggcccttgtcacagtctctgctttctcaacagccggatatcctccccatagaaggggagcacgcggtactccccctccaggcgggaggcgatttggggggtgtagcgggcgcgcacctgatccatggtcaggttggaggagatcaccgtccgcttgtccgccgtcagacgggtattgatgagggtgtagagggcggactggacgaagggggtggaaagctcgctgcccagatcgtccagaatcagcaggtcgcagcccaggtagcggcgggtctcgtctttggcctccccggcctccagcttgtcccgggcgaacttctgctcctcgaagcgggtgaagatgttcaccgccgtgtcgtacaccacggagaagccgctctccgacacggtgcgggcgatgcaggccgagaggaaggtcttgcccagccctggcgcgccggtgagaaacaggttgcggaagtagaaccggccgaacttccgggcatagctggagcacacgtcgaagataaactccatgttctcccggggggagagggactcccccggccagggcaggggggagtagtagtccagggagaaggagtcaaaggactgctcccccagatccagcagcttggacagctccctgatctgctcctcggtgcacagcgccttaaggcaggcgcacatattggcccccacccagccggtgtcgctgcacttggggcaggcgggcttgtcgtcgagggcgtcggcgggatagccgtgctcggtcagcagcgccgccttctccgcctggaggctcaggtttttatcccggatcaccccgatggcgggcaccggatcgctgccgtcccgcagggaggcggcgatgatctgggtgatggtgcgccgcagctcccggtcgatggccgccacccggggcagtttggcgtaaatctcggagcgcaggcgctcctgcgcctcctcccgggccttccgccgggcctccagccgggcggtggcccggcgcagaacgctctgctcgtatcccatggcttactctccctccgtctcctgctggcggcgcaggaactcccgcatccgctccaaatcctcccgcacccgctggtcggcctcgccgggggcggcggggcggccctgcatggcgggctgggccgccgggcggcgctgccggtcgcccgcctccacctccgccagggtatgcaggttcttccggtgccagccgcacagaatgccgttcatgtagtcccagtccatcttctgcttcttgtagaccgtcttttcgtaggccaggcggagcacctcgtcggcaaagcccatgtccgtccaggccgccactttcttccgctccttctccaccagggggcggggcggctgatccagcaggcggagaatctccccctcccggctgcggtagagggcctgcttcttgaggtgggcctcggcggcctgggccgtgtccacccccagccgccgccacacgaagccctccttctgaatctggctcatgcggggcttgcggccggggccgtacttccgctgaaactcctccacgcaccagctcaccagcaggcagatcacctccgccggcagggccaggtagtcgtagagggtgtacaggctcttcaagtccgacgtggacaggatcttgcccagacgccgctgcacctcgttcaccaggccggggaaggaggaggcgccgtcctccagctcccgcgtgatgtcggcggcggtgtactccggcgggccctccggctccatccgggcgggggcctccggcgcggccgtgccgtccgccaggcccagcccgaccagggcggacagggccgcctccagccggggcacgtcccacttcagcgcccggcgggccgcctccggctccagccgtccgccccggcgcagcaaccacaggtacagcagcgctgcgtccccgtttcccgcgcccatcagccggtcggccgcccgggccgtcatggatagaatgtcaccgggcagcagcagctcggccatgtgaatcccccgttcctctctggtttcccgcctattatagcataaaactacgcgcggtgtatactgtggatatcggccccctgcgtggcgtgcggcgtaggggcaagcggggccgcggccatatgggaagggagaaaatgcaggctgggtgcccacacccgcccgcgggcggccacaagggccgcccctacacagaagcgcggagcgcccgggagcagggaaacagcgagacccgcaggcgaaaaagcagttgcgccgcaggcgcaaggtgttttttgcggagggacgagcagttgcccgtcgcggagggcgcgcagcgtgacaacacagaagcgcggagccgtcgtgagccgcggcacagtgagccgcgcaggccggaaaacaggccggccgaagcccggcggcatttccggcggagcggggaatagtgaccgcgtcgcgaacaggcagagcgtgacagaaagcgcggagccgtcgtgagcagcggcacaggttgccgtccgggcgggaaaatgaaaattcatgaagatttcatttctcatccgggcggaactatggtataatagccgcaaagcggctattacacttgcatttcagccgtttttcccgccccttgcggggcaaccgaaaaacagagcgcattataccattccgctgatgcttcctggtataatgtccgaatcctaaatcactatggtcaggaggggtttccatgaaaaaccgtgtcaccgtcaccatcgccggacaggagtatacgctggtgggcaccgaggaggcgagctacaccgagaaggtggccgcccacgtggacgccaaggtggaggaggttttgagcggagcccatgtgtccctggtggatggggccatcctggcggcggtcaacattgccgacgagtacttcaaggaggtggaggccgccgagaatctgcgccgccagctcaaggagtacctggaggaggccaccaagatgaagctggagctgtccgaggccaagcgggagatcttcaagctgcagaacaagaagtaagagagcggagcgggcggctttggccgcccccgccagggaggattccgtctatgctggaattgctcgcccccgccgggtccatggaggccgtggcggcggctgttcagaacggcaccgacgccgtctatctgggatacggggactttaacgcccgccgcaacgcgaaaaatttctcggaggaggagtttgcggcggcggtttcttattgccacctgcggggggcaaaggtctacctgaccctcaacaccctgctcaccgaccgggagctgcccaaggcggcggaggtggccgcccaggccagcgccatcggcgccgacgcggtgctcattcaggatctgggcgtgctgcggatgctccgccaggttgcccccgatctgcccgtccacgcctccacacagatgaccctccacaacctggacggggtgaagatggccgccgatctgggcctcacccgggcggtgctctcccgggagctgagccgggatcagattgaatacatctgccagcgcgcccccatcgaaatcgaggtcttcgcccacggggccctgtgcatgtgctactcggggcagtgctttctctcctccgtcatcggcgggcgcagcggcaaccggggcctgtgcgcccagccctgccgcctcaagtacggctggatggacaaggccgacgcctaccccctctccctcaaggatctgtccctggcgggacacctgcgggagctgcgcaggatgggggtggcctgcgtcaagctggagggccgcatgaagcggccggagtacgtggccgtggtcaccggcatctacgcccgggccatccgggaggatcgggagccgacggaggaggagctggagcagctccgggccgccttctcccgccagggcttcacccagggctactacctggatcagcaggggccggacatgttcggcgtgcgagaggagaccagggagccgaaggagctcttcgccgccgcccgtaatacctaccagagcggggaggcccagcgggtgcccgtcaccttctacgccatgctccgccccggcgagcccgcccgcgtgggggtggaggatccggacggccgggtggcgacggtggagggcccggtgcccgaggccgcccgcacccgccccctgacggcggaggcggtcaccacccagctctcccgcaccggcggcaccccctaccgctgcgggcaggtgcgcgccctggtggaggagaacctgtccctccccctggccgccctcaacgccctgcggcgggaggccctggagaagctctccgtccagaggcaggagccgccccgccgccgcgccggggagtaccacgccggcgcccgctatgagaaccggcgggaggagccggtgctgaccatctccgtgcggagggcggaacagctcaccgacgagctgctccgcctcaggcccgccctggtgtacgtcccgctggacgagctggccgcccacctggagaaggccgccggcacggagcacacctccatcggggtgagcctgccccgggtggcctgggaccgggagtaccccggcctgcgggaaaagctggagcaggtgcgcgctttgggggtaaaagacgccctgctgggcaaccttggtatgttccccatcgcccgggagctgggcttcaccctgcggggggacttcggcctggagatctacaacgcccaggccctcaaggagtacaagcggctgggcctccagtcggccaccctctcctttgagctgaagctggcccagatccgcgacctctccaaatgcctggacaccgagctgatcacctacggccgcctgcccctgatgctgatggagaactgcatcatcaaaaaccgcaccggctcctgcggctgccagaacaccaacatcctcactgaccggaagggcgcccgcttcccggtggtgagcgcccccggctgccgcaacgagctgctcaactcccagaagctcttcctggcggacaaggccgccgactaccgccgcatcggcctgtgggcccagcggctgctctttaccaccgaaaatccacgggagtgcgtgcaggtggcccagcgctatctggagcaggggagctgggctcccaacgagtacacccgcgggctatactatcgagatgtggagtgaaccccatgaagctgaagatcaaggccgtatcggacaagatcggcaaggacatcccctgccccttctacgccaccgccggcgcggcggccatggacctgtgcgcctgcgtggacgcgccggtggaggtggccccccgcgccctggtgagcatccccaccggcatcgccatcgccctgccctcggcggagtatgtggccctggtgttcgcccgctccggcctgggcatcaagcacggaattgccctctccaacggggtgggcgtcattgacagcgactaccggggggagatccgggtggggctgaccaacctgtccgacaccccctacaccgtccggcccggcgaccgcatcgcccagctggccgtcatgcccgtggtgcaggccgagctggagcgggtggacagcctggacgaaaccgggcgggggaccggcggcttcggctccaccggaaagtaagggcagacgcagcagaccggtgcgggccgccgggacgtgtaggggcggggctcgtccccgcccgcgggcggccacaagggccgcccctacagggcagacacagcgaaccgatgcaggccgccgggatgtgtaggggcgggcgcccacacccgcccgcgaaagatcatggaaccgggcggagcgccgcggctgccgcgcccctccggccaattaggaaaggaacagaagtatggagatcatcctggcctcccagtcgccccggcggcgggagcttttggagcgcatgggggtaaagaactttcgcatcgtcacccccgatattgacgagcacatggagcgggagttgcccccggaggagctggtgcgccgcatctcggcggagaaggcccgggccgtgcgggagcaggcaggcatggatgcggtggtgatcgccgccgatacggtggtggccctggacggggcggtgctgggcaagcccgcggatgagctagaggctttcaagatgctctccaccctctccggctgccgccaccaggtctataccggccttaccgtcctgcggggggaggagcggcacaccgtcagcgaggagaccaccgtcgccttccgggagctgagcgaggaggagatctcctgctacatccagaccggagagcccatggacaaggcgggggcctacggtatccagggctttggggctctgctcattgaaggcatccagggggattactacaatgtcatgggcctgcccgtgtgccgcctgggcggcatcctgcgccagctcggcgtggactgcctgcgcttggcggcgggcgagcgggacagcgactgagagagagggaacggacagacgtgaaggattttttccggcacaacggaatcctgattttaatcgcagccattctgctggccctggtgacggcggtggtgtcgatgctgttcggcggtgtggctgaccccctgtccaacctggtgggaatcgtcaccacgccggtgcgcaacggtattaccgcagtgaccaactgggcggaggagaagtacaacgatgccttcgagctggagcagatgaaggaggagctggccgggctgaaacagcgcaacgccgagctggaggcccaggcccgggaggcggaggccgccctccaggagaacgagcgcctgcgcaacctgctggagctccagcccaaggagtggtcctgcgacaaggccgccgccatggtcaccgcccgctccacctccaactgggagtccaccctcaccattggcaagggcagcgctgcggggattgccgtggatgactgcgtggtggacgagtactggaacctggtgggcgtggtggcggaggtgggggagaactgggccaccgtgcgtaccctcgttgactcggacaccgagatgggcggccagctcgcccgaaccggcggcgcggccatcctggagggagactttgccctcatgggggagggcaggctcaagctgacttatctgccggagaacagcgagctcatcgccggggatctggtgaccacctccggccggggcggggtataccccgccgggctggtggccgggcacgtggaggaggtgcgcaccgacgcctccggcatgacccgctacgccgttattgcgccggagaccgatctggacggcctccagcaggtctttgtgatcaccgactttaccgtcaacgaataaatgggacgtggccggaaaggggggaagcgccggtgaccagacaggattttctcattaaatggggcgtatacgccctggctctggtgcccgtatggttcctggagctgtttgtgctcaaccgctttcccctctttggggtggcccctatgctcctgcccctggctgccgtgtgcgtggcggtgctggagggcaccacagcgggggcgggcttcggcctgttcgtgggcatcctgtgcgacgcggcctacttcaacaccgacggagccatgacggtggggctgtgcctcatcggcgtgggggccggcgccctggcccagtatgtgctgcgccagaacctggtgggctgcctgttgtgctccttcgcggcgctggcgctcatcgacggggtgcgcatcgccgcccgcctgctggccgggcggggggagctggccgccatgctcggcctggccggacgggagattctctggtccctggtctttgtgttcccggtgtacgccctgttcctgtgggtgttccgccgggtgccgaaaaaaaccgtgctgtaaagacaggccgccccgctgtcgaacgcggggtggcctcatagactgaaaaagggggcccgccatggagggcagacaattcaaccgccgcaccctcgccatcctggtggtgcttacggcactgctgctgctgttttttggggtgctctacaacctgcaggtgctccatgtggacgactaccgggcccagagcgtggtcaagattgccaaccggaagacggtggaggccgcccgtggggagctgctggaccgctacggccggagcatggtgaccaaccgtgccacctaccagctcacgctgaataccggtgtgatgggggaggaggcggtgcgcaacgccaacctgctggagctgctcaacatctgccgggacaacggcctgacctggaccgacaccctggccgtctcaacggcagcccccttcacctacaccagcgacacccctctggcctacgagaaggaggggggcggcgtggccctgacccggctgggacggctgctcaacgccctccctatgaaaaaggagctgaaaagcagcctgaacctgcccaccaccgagcaggtagaggccgccaagaccctggacgatatccccgccgggcccacggcggaggagctgatcgccgccctgcgcacctactttgagattgacccgtcctggtcggacgccgatgcccgggccctgatcggtgtgctctacgagaccaatctgcgcacctacagcatcaaccagcaggcgtacatctttgcccaggatgtgaatattgatgtcatctctgcggtgaaagagcgccggcttaccggcgttaccatcgaaaccaccaccgtccgtcagtacaacactgtagccgcagcccacctgctgggccatgtgggagacatccagtccagcaactgggactactaccgggagcagggctacagcatgaacgacaaggtgggcatcgacggggcggagaacgcctttgaggagtatctgcgtggggagtcaggggttcagatccaggagctgtccaccagcggaaaggtggtaagcgagtactggcgcatcgaccccgagaccggagaggagcagatccccaagccgggggacaacgttctgctcactctggacctccgcctccaggagaaggtggaggagattctggccaacaccatcgagactctggagtcggaggataccgggggcggcgcggtggtggtggagagtgtcaagacgggggagatcctggcgatggcctcctatcccacctacgatctgtcccagatctacagcaacaccgccctctttaacgaggccagggataacccgctgaggccctttaccaaccgagccgcccaggagttttactatcccggttccaccttcaagccgctggtggccatcgccgcgctggaggagggactgaccacgcccacggagaaaattcaggacaccggccgcctccagctccccgaggaggagcactacccctacggcgatttccatccccagtgctggatctaccgccagtacggaggcaaccacgggtgggaggatctggccgacgccctgcgggactcctgcaacatctacttttacaccatgggccaccggctgggcattgacaagattgacgagtacgcttccctgttcggcctgggagagtacactggtatcgaactgcccgaggtgaagggctatgtggccggaccggccaccagcgaggccctgggggtggagtggtacggcggcaacctgctcaacgccgccatcggtcaggacaacacccaggttaccccccttcagctggccaactatatcgttaccctgctcaacggcggcgatcacttcgtgcctcacctgctcaagtccgtcaagtccagcgactactcggagacggtgtatgagcagcagcccgaggtgaaaaaccacattgctctcgaccccgccaacgtggaggcggtgaagcggggcatgtgggaggtggccaacgaccccaagagcaccgtagaccagtacctgagcaacctggcggtggaggtgggcgccaagaccggctccgcccaggtgggctcggcggacaaggaggccgacgccgtcttcaccctgttcgccccttatgacgacccggagatcgtcatctccatcgtggtggagggcggtgcctcgggcggaaatctggcccaggccgccggcgagattgtcaactactatttcagcgcggagcatacggtggaatcggtggacgccgagaacaccctgctccgctgaagggagccgttccttgtgtgtgatccccagacctttgacagccgggacagccggtataagcgcccctatggcgccgtaccctccggcacccgggtagagctggccctccgcccgccccgggccgggggattttctgccgccacactcatcgcctactttgagcaccgggacgaggagcgccgggagctgcccatgccctggcggggcctggagggggaccgggatgtgtttgccgtaaccttggagaccggggactatgtgggcctggtgtggtactccttccgcctggagggcctggacggccgcagggaggagctggggcccttccagctcacggtatacgacggggcggaggaggtgcccgcctggttcggagagggcgtcacctatcagatcttccctgaccgcttccgccgcacccgggttcccgatcccaccggcatggtgggagggcgcagcgtccacaccggctgggaggaggagccggtctaccgccccgaccggaacggtgaggtgcgcaaccgggacttcttcggcggcgatctggccggcgtgcgggagaagctgggctacctgcggggcctgggggtggataccctctacttctgccccatcttcgaggccccggagaaccaccgctacggcaccggggactatgagaagatcgaccccatgctgggcaccgaggccgacttccgcgccctgtgcaccgacgcccacgccctgggcatgcgggtggtgctggacggcgtgttcaaccaccagggctttgtcagccgctatttcaacggcgacggctcctatgagagcgtaggggccgtccagtcccaggacagcccttattacccctggtaccacttctcacactggccggacaaatacgactcctggtggggcatctactccctccccgccgtcaacgaggccgattcctcctaccgccggtatatcttcggcggcgcggacagcatcatccgccgctggctggccgccggggcggacggctggcggctggatgtggccgatgagctgcccgacgactttatccacggcatccacgctgccgcccggcaggccaagccggaggcggtaatcatcggcgaggtgtgggaggacggctccaacaagatcgcctacggcgtgcgccgccggcacatcctggggggacactgcgacgggctgatgaactaccccttccgaaacgccctgctctccttcctgctgggcgaggacgccttccgcttccggcaggccatggagaccctgcgggagaactacccgcccttcgcctggcgctcggccatgaacttcctgggtacccacgacaccccccgcatcctcaccctgctgggcacggggggcgacgggcgggagcacgacaaggactggcgggcggccttccgcatgtcccccggccagtacgccctgggtaaagcccggctgaagctgggggccctggtgctcttcgccttccccggctcccccatggtctattacggagacgaggcggggctggagggctttgaagacccattcaaccgccgcacctacccctggggaagggaggacggcgagctgctggaatggtacaccgccctggggaaggcccgccgggcgctgcccgccctgcgccggggggagctggcctggacgctcacccggggacgggtactctctttcctccgcaccggggccgaggggagtgtactggccgccgtcaacgccggcgacaggccggagcccattgatctgccctggcccgcccgggactggatgaccggggcggccctggaacagggggagcagacgctccctcccatgacaggctggctgctgacgccccggccggaaggagcgtgaactgtggagcagcccctcatcagcattatcgtgccggtctacaacgcggagccctatctggacaactgcctggactccattgccgcccagacgtgggagaacctggaggtgtggctggtggatgacggctccaccgacgccagccccgccctctgtgacgcccgggccgccgccgactcccgctttcacgtgctccaccaggccaacgccggggtatccgccgcccgcaatgccgctctggagcgggctacggggcagtacctccagtttgtggacggggacgactacctgccctccaccgctaccgagcggctggtccgcaccgccggggccaccggggctgatctggtgatcggccgcttctggcgggtggccggcacccgcaaggccctccagggccacattcgccgggagggggtgttcactcgccgggaattcgcggaggagatgctcaaggccccggccaacttctactacggcgtgctgtggaacaagctctaccgccgctccattgtggaggagggcggcctgcggtgcgatccggaggtgagctggtgcgaggatttcctctttaacctggagtacatccgccgggcccggctgatcgccgccaccgcccagccggtctactgctatgtgaagcggccgggcagcctggtggccacccaggccaccctggcccggacggtggagatgaagcgcaccatgttcgccgcctacaagcagctctatcaggcgctggatctctatgacgagcagaagctgcgggtctacggctacctggtctcagctgccaaggacggcgggagcgtggccctgcggcccccggccctccccaaacggcgcgccaggccgccccgccgccggaccaggcggcgcagaaccggaatggcataatgtccggagccctgtcgaaacgctgcttcggcaaattgaaaaagcggaacggcatagccgttccgcttttcgtttgctggaaagggggtcaggcgcggtccacccagatggggctggaccaggccatgtgctcgtccttctgggtgacgcgcaggtagtagcaggcgccgctcccggcggtgtcctccagggtgaagtcgcaggcattgcccgcgcaggcccaggtctggatgacctgattgtcccgcagcagctccacggtgacggtgtcggtgcccagaacgctgccctcgatggtgacgggggcgtcgccgatggccttgacctcgctgcccataggggcggagttgatcttcagggagaccaggatgcgggcgccggtggtgccgtaggtcaggcggtcatagatggcgtcccacacgtactcccgcttgagggcggggacgaaggcggccacaatgccgccctccacgccgtgctcggtctggtgggagtcgctgccggcggtgaagcccatccggtagccccgggccagggcgtcctgcacgctgcaccgctccatcttcttgatgttcttggtgaacttggagcgggcctcaaaggtctcgaagggggcgtggcgggagtagatctccacggcgcgctgcacctcgggatcgtggaagttccagtcggtggcggcgctcaccatcacccagtccgcggcggggtggtgggggatacagagggccttgtaggagcggatgctgttgtagaggtcggtgggggtcatgccgcccttgtcgccggagcggaagatctcgccctcgtcgccccggtagtatacgttcttgtggccgtagtcgtacttgtactcgttgggagtccactcgtaggccagaaggcaggccagctcgccgtccttgttcatcaggcggcagttggtgcgcagcagctcccactcggactgggtcgtccagtcggggtagcagtcgtggtcggtgagggcggtgaagtccagacgggccttgtcccgggcccggtgatagtactggtccacctcgcccatgccgtcggacaggccgctctggccgtggatgtcgccaaagtagacggacaggttcccgtagccgttcttgtccagccaggcgcgcaccacgtcggcggggtgctcgtccaggcgcttgtcggcgttggcggggatgggctgggtgaagtcgctggggggcgccacatagtcgggctgctgggccagctcggcgggggtgaggtggttgtagatcacctgggcgttgcgctccatgtggccgttcttgaagccaaactgccacatcagatggatggtgtcgtcctcatccaccagcaacttgggatggacgccgcagtggccgtcgccgtaggacatcagcaccggacggctccagggctcgctgccccggcgggtgcacaccagcacgtcgtacttgctgcgggtgtaggccatggcctgaaggccggaggagttggaggccacgtggagatccagataccagtccacgccctccttgaggcactggggattgaccgcggtcagggcgccgtcccggacggtgaggtcggcggagcggacggagtagacggccatatagccgtagtcgtaccagcccaccacggcgccgtcgggcttggcggcgatccacggggtggaggcccagtcctcgccctggctgaccacaatctcctcactccagcccgcggcggtgcgcgcccgggcaaagagcttgtactgcttgccgtcaaagccgtcgtaggccacatagaggttgccgtcgccgccctcggccgcgccggcccggtaggcctcgcccaccacggacacggtctcggccgcgccggggccggcctcggtcagggggcacagcacggcggccgcgctgcccttgtgctgctccgtccagatgatgtgcagcctgccctgccaggtgaacaggcgggggaagaacagggcctcgccggaggcgacggtgagcacctcgccccactggccgtcccgatagcagcgggccaggatgcgccagttctcccgggcgtactcgctccaggcgtaccagatggcgccgccgtgggccagaatgacggggtggagcacctcgccgccgtcggagatctcgcgctcccacaccacctcgtccccccggcggcaggaggccatcaggctgtcgtggcggtccacaaagcgctgccagcacagatagacgtcggaaccatccagcgcgatgccggggaactgtgcgttctcccgatagagatcggtaatgactcggttgttctgaatctgttccataatacctcaacctcagctttctattcgtcgtcgtacttaccgacaccggccgggggcttgatgtgcttgacaccgaaggccagcaccagcagggtcacaatgtaggggagcatctgcacgatctggggcgggaaggcctcgccctgaaggtagatctgcaccgcgtcacagaagccgaacagcagggcgcagggcacgatctgggcgggattgtagcggcccaggatggcgatggccaccgcgatgtagccgcggccggcggtcatgttgcgcacgaacatatccaactgatccagggacaggtaggcgccgcccacgccggccagcgcgccgcagatgagcacgccgcagtacttgatgccgtgaacccgcaggcccatggtggccgcggcctttgggttctcgcccaccatgcgcaggcgcaggccgaagcgggttttgaagaggacaatccaacccacgatgaccacagcgaccatcacaaggaagctgacggactgctgggccagaatggggccgatgacggggatgggggcaaagaagtccagggtggtggagatggaggccacctggggggtggagcccttgttactccagatgagctgcatcagcagggtggtgacggccagagccagcaggttcagtccgatgccgctgatgacctggttgaccttgtagcgcacggacaggatgccgtggaacaggccgatgaccatgccgcccaccatgcccagcaggaagccgaagagcacgctcccggtgaagtaggagccgagaacgccgaagaaggcgcccatcatcatcatgctctccaggcccagggccatgatgccgctgcgcaccgagaaggcgccgcccaccgaggccaggaccagggggatggacatggcgatggaggagccgatgatgggaatcaggttgttgagaatcacgcccatgtcaggccacctccttcttggtcttgcgggaccagcccgcggggttgagccgcttgagctccttcaccagcagcggggcggccaccagaatgaccaccatggcctggatgacgttgacgaactccaccggaatgctggtggtgcggttgagctccatggtgcccgcccgcagcgcgccgaacacgatgccggcaaagatgacgcccacggggctgtccgccgccagggcggccacggagatgccggagaagccgtagtcgttggagaagccgttgatcaggcggcggtccacgcccagcacatggctggcgccggccaggcccgcgatgcagccgctgatgcacagggccacgatggtgaccttggccttgctgatgccggcggtctccgccgcgtccgggttgaggcccaccgcgcggatctcgtagcccagggcggtgcggtccatgaacagcttgaccaggatacaggccgccaccgccagaagaatggcgatggtgagctggtactgctggaagatgcgggggagctgcgccgtctccagcactcgctccgtctgggccaccgagctgttctccgccagcatgggcccgttgagcaggtagtccaccagataggtggcgatggagttgagcatgacggtggcgatgacctcattggagccgaacttgaccttgagcacgcccaccagaccggcgtagaggccgccggcggccatgccggccgccaccgccaggggcaggtggagcgccatgggcaggcccagatccagcatgcccaccgcagcggaggccagggcgcccatgtagagctggccctcggcacccaggttgatgaggctggccttcttggcgaaggcgaaggccaggccggtgaaaatcagaggggtggcctgggtcagggtctggacaatggcgcgctggctgccgaaggagccggccaggatggcgccgaaggcctcaatggggttgtagccgcacaccgccatgatgacgccgctgatgacaatggcgataagcagggagagaatggacagcagcgggccatccagcttgagcagaccgctcagagcacgctttttcatgcggttccctccttttccggcgcaaggctgccgccggtcatcagcaggccgatctccatgtcgctccaggtgtccggcttgccctcggccacgatccggccgccgtagatgaccgccagacggtcggacaggctgcgcacctcgtccagatcggcggagatgagcagaatggacttgccgccgtcccgcagatccaacaggcggtggtgaatgtactccatggcgcccacgtccacgccacgggtgggctgggccacgatgatgacgtcggggttttcgctgaacacccgggcgatgaccaccttctgctggttgccgccggagagggcgctgcaccgctcctgcacgttgggggccttgatggcaaactcggtgcgctcctgctcggcaaatctgcggatggcggaggccagccgcaggccgcggcgggcgaaggcggggcggcggtgatagcccagaatcaggttgtcctcgatgctcatctccagcaccaggccgcgggtcatgcggtcctcgggcacatggcccacgccggcggccaggaaggcggcggcgttgccgctgaggggcttgccgtccttgaacagctccatatggtcggggcggcgcaggcctgtgagtacctcgatgagctcggtctggccgttgccctcgatgccggcgatgcccagaatctcccccttgcgcagggagaggcacacgtcgcgcaggatgggcacgccccgctcggtgagggagaggccgcgcacggaaaagttttcctcgcccacctgctcggcccggcgggtgacggagagctccacgtcgcgccccaccatcatctgggccagctcgttcatggtggttcccgccacggggacgccgctctcgatcattttgccctggcgcagcaccgacacccggtcggcgatctccatggtctccttgagcttgtgggtgatgataatgatgctcttgcccgcggccttgagctgccgcatgacccggaagagatcctccacctcctgtggggtgagcaccgcggtgggctcgtccaggatcagcaggtcggccccccggtagagggccttcaggatctccacccgctgctgctcacccacggagagggtctccaccttggcggtggcggagatgtggaagttatactcgtcgatcatggcggcgacctgggcctccgccttcttccggtcaaagaaaacgccgcgcaccggctcgctgccgatgaccacgttttccgccacggtcatgaccggggtgagcatgaagtgctggtgcaccatgccgatgcccagggcgatggcctgggcggggcgggtgatggcgaccggcttgccgaagacgcgcacctctccggcggtggggggggtcatgccgtacagaattttcatgagggtggacttgccggcgccgttctcgccgagcagggagtggatctctccctgctcgacggtgaagtcggcgccgtcaatcgcgcggacgaggggatactgcttgacaatcccgcgcatttcaactgcgttcaaacgtcatcgcctcccggcagattatcggccgctggggccggggtgtcccgcttactccgcgggctggtactggttggcggccacccaggcgtccagctcctcggcggtctcgcagggcaccagctcgccggcggtgatcttggccttgatgtcctccacggcggcggcgatgtcgtcgggcagaaccacgttggagtcggtgttgtcaaagcccacggagccctcggcaatgccgctgatgtgtacgccgggctcccaggtgccctccaccagggccttgatttcgttgtagacgatggtgttcacgtcgcgcagggcggtggccacgatgtagtcgggctcgatgtagttctggttgccgcccacgccgaaggcatagcggtcggcctccttggcggcggtgaagacgcccatgccggaggcgccggcgatgtgctggacgaagtccgcgccgcggttgtacatggacagggcgatctccttggccttggcggggtcgttgaagtcgcccacgacggcctccagcacctcgcagtcggggttgacgtagcgcacgccggcctcaaagcccactacgcccatgcgcagggtgggctgatcctggcccaggatgacgcccaccacgttttcgctgttggccttgtccatgccggacagggtgcccaggccggccaccacgccggtcaggaaggtctgctcctgccacttggtgtagacggcgctgacgttgggcaggtcggtggaggagtcgatgtgggagatcttctgctcggggaagtcgatggagatctcgttgatggcctcggtctggtcggccgccaagccgatgatcaggtcgtactcgccgctctcggcgaacatgcggtagttgggcaggaagtcgctggcgctctgggtttccacatagtcaaactcgatgccgaagtctttttccgcctgctgggcgccggcgtaggtcatatcgttgaagttcttgtcgcccaggccgccggtggacaggatgatgcccaccttcagggcgtcgccgtcagaggcgccgctgggggagctggaagatggggcgtcctggccgccgccgcaggcggacaggccgagggtgagggtacaggccagagagagcgcgagcagtttctttgcgttcatgacagggttcctcctttaattcattcggcacagcagggacactttgggcgtgcccggcccaagcttacaagttgagtttaacaaagaaaacaaaaacggtcgagccataggcttgaccgtttttgggacgaatatgatatctttttccgcacggggcgggaaatgtcacaattttgatttttttgtcacgattttgacccccggcgctccgcctccggggacacgcccttgtactttttgtaaagccgggaaaagtatccgggggtggtatagcccgtctgtaccgccacgctggcgacgggcagatcggtggtctggagcagctcctgggcccgctccagccggtagcgggtgaggtaggagctgaagttctcccccacctcctccttgaactggcgggaaaagtgctccggcgagcggtagagctgggcggccacctccgccatggagatgggctgggcgtagtgggcgtggatatagttcagggcggtctcaatgggccgggagtggcggctgcgccgttcccggagcacctgctccagcatggccgagcagcggctgcggcaggcggtgaaggaatggggcggctcccagccgtcggcggggggcgtgacgaactggtagtaccagtcctccatggagatcaccatgcggttgaccgtgtccaccgcccagcgcacgtcatcggctcccaccatgccgaacagggcgaaccaggcccggagcgccccgcgggcctcttccacctggcggcgggccaggaggcgcagcacctcctgctttctggcgtgggcggcctcccggtcaatggggggcaggccgtgaatggcggagtagggcaccacccctccgccggtgaagaagcaggcctcctgagccgccgccgcctcccccagcacacggatgagctggccgatgtcggtgcacagggcggacacgccggcgggcaggcggcactcccccagggcggcctccgtgtccagggcatagccccgcagggcctccgcctccgggcactggaggagcaggtagaggtgctcctgcaccatggcggccgcagagaagggggcgcgggaggcggaggctagggccaccatctgccgccgcaggtccaggctgctgtcgttggccacacagaaggccagatagggctggccgggccgcagcccctgccgctgccagaaggcggccacagcgccgggctgttcgaaattgcggtacatctcgtagaggtccaccaccccgtcctggaggacatcatgcaccttttccgagcggatcttcgccgtggtggccgcaatctccgctacgatgcgctgaatgtcggaggagcgcatctccgacttgaggatgtactcccgggcgcccagggagatggcctgcttggcgtaggagaactcggcgtagttggtcaggatgatgaacaccgtaaaggggaggatgtcccggactttactcatcagctccagcccgtccattcccggcatgcggatgtcggtaaagaccacgttgggcttctgctccaaaatcctgcggtaggcctcctctccattgaccgcggaggtgacggagctggccgcctcacacttctggatgcagtacaccagccagtcccggatgggggcctcgtcgtccactaccataatatgaagcatggagctcctcctttctctatcgggtgcggggcaggcggaaggtgaccaccgtgccgcccgccgggccgccggtgaccgtcagcccgtagccggggccgtagttgaggcggatgcgctcctgcacattcttcagccccacccggttaatctgcaagtccttgttcatcacctggtcgatcttgtctttggaaatgcccactccatcgtcctccacccggaggatcagggtgtccccctccagccagccccgcaggcggatgtggattttgtgccggcctacgccgtggaagatggaattctccactaccggctgaagcagcagcttgggcagcgtgttgtcccgcagggcctcatccacctcgcaggagtagtcaaaggtatcgggatagcgcaggtgctggagctccacatagcacttcagcgtgtccagctcctcccccagggggatgaactccaccgagcgggagagagtctggcgcagcagcttggagaagtagaacaccatctcccccgcctcctgtaccttatccatctccagcaggaagcggatggagctgagggtattgtagatgaagtgggggttgatctgggcctggagaaaatccagctccgccagatgcttctcccgctcctcccgtttgaccgactccagaagggtggagatctgctccaccataccgttgaaggcctcctgaatacggccgaattcgtcctttcggcgtacgtcgatgcgctcgtccaggcggccctccatgacccggcccaggctggcctggagctgggtgatggggcggagaatctgccggtaggcgtagagaagcaccgccagaatcagggcggcgcacaggccggtggccaggaaagcgccattgcgtaccagattcagcgtgccgaaggccgccgaggcactcatctcctccaccagataccagtccgtccccggtatgcgttcatacaggcggatctgcccgccgtcaatgcggcgggagagggacgtctccgccgccagggcgtccaattcctccggggtataggcatagatggaaccaatgagctgcttgtcccgggctgagacaatggtgcccgacccgtcggtcagaaaaaatcggttgtcggcgctctggtgccgcagatattgggagtacaggctgacctcgctgatgttgaggatgaccaccccaagcggctcctgagtcaggtggtcccggataagctgggcgtactggaaggagtggacaaagatgcctgtggcctccggatgggtggtggtgggcagcagcagggcgtcctgggttccgctgaacaggggctcataccgggggtcggccaggacggcgtcatagttgaactgcctggagctgtaagtggcagcggtcacgccgttgaagcccaccacataggagtccatcagcattttgatgccccgctgccacacatagtcgctgctcaggctgtagagcagatcgtgggcggcctcgtccgcccgctctccggcggggccggagagcagttcaatgagctgtgtgctctcagcgatgcgcttggccagggtctgggtatcggtcatgccctggccaagggtgtagctgatctgccgcaggcccgcctggttgaggcggatgtactcctgccccaccacctggcgggcgtagtggtaaagagccagctccacggaggcggtgatcagcagcagcagggcaaacagcagcgcaaacaggcggaacagaaagcttttgcgtcggtgcatccccgcgccccccctaaagactgatttcccatccagttcacccgaaaagggagatatatctgatctattctaccacattgccccccgacgcgcaacgttggccgcagaatgaaaagcccccgccagggagggcgggggcacggtcagcgcaggaggacggcgcccagtccggcgctcagggcgtacgcccgccaggcagtcatctgctccggcgtgggggaggggcggccggccagagcgccgcgcaccccgttagggcggaaggtgatcagcttgacgggggtggagggggccctggggcccagcgcggcggccactccgtccagcacggcctccacatccaccgcgtccggagcgcacaccacccgcacctccgccagcttgccgcaggcggacagaaaggccagattctccttcaccggggcgttgtccgccccggtcagggcccggtggacggcgggctcccatgccttcacgtccagcatcaccccgtcgcacaccgccatcagcccggtgaggggggccaggggaaccatgccgttgctgtccagcaggcagcccaggccgccggcccgggccagggtgaacagctcggtgagaaagtccgggtagagggtacactccccgccggagacggtgaggccccggataaagggccggctgggggcaagggcggagagcacctccgaagcggtcatgacggtgaccttgggggaggcgaaccgggggcacaggcggatgcaggcatcgcacccggcgcagcgctccgccgcccagcgcacccggtcgctctccagggacagggcccccgccgggcaggcgggcacgcaggcgccgcacccggtgcacaggttctgggtctccgggttgtggcagtaggcgcaggccaggttgcagccctggagaaagacggccgcgcggcagccggggccgtccacggtggagagggggagaatccggttgactggcgtggcggcgctcataccatccgcacctttcgctgggccaggcggttgacgtcgtagttggccgtgcccaggtgggtggtgttctggagcaccacctggtgggcgcggaacttctccatctcgctgcgcttgaccagatagccggtgatgcgcaccaggtcggtgtccgcggaatagaagctcatgtagtgtaccccaagggcgaaggcccccttcaccacgtccagcagggcggcggggttctgctccacattggaggcgatggggaagatgtcccccacccccgcggggaaataggggtggaaccgggcgcagtggcgcaggtggtcggcaaaggactccggctcactccccacggggatacgcacgccggaggtgatgcccacgtcggagtccaggcccacctgggcgtggagcaggaagtggttcccggtcaggggggagtgggcggcggggagggttttcaccacggcgtcgatcttctccatgatgcgcacgcccagcgcgtcggcctccccgtcacggccatacaccagcccccggtcccggagcaggtggttgaccgcctcggccagaccggtgacgccgaacatgggcagaaagcggtcggcggagataaggccctcctggaccaggaagctggaggggaagaagccggactgctccaccaggaagcggatgcgctcgttcatgtagtcggtcgtcaggcgtaggcactccgggagcagctcctccacaaagtgctccacaccccgggcgtcgtccaccaggcgggtgagggtgacccgggtgagggtgtaggcgccgccccggatgggcaggatgttgtaacagctcgacacgccgtagtcgtcaaaggtgtcccggttggcgggatggctgcacagggccgggttggagcaggccagggaacagcggatggccgcctctgcaaaggcgtcgggggtgacctcggggtcgtacttcagcgtgaagttggggacggtgttctgcacctcggagagcacctccagcagcaggcggcccgcccgggtggccgccgggcccaggttggcatggcagaaggagtcggtgatggtgcggtccagatagttgaggaagaggcgcagcttcctgcgcgcctcctcgtcgctccagccgtccaggaaggggtcgatgagggtgtccagattgcccaggtacaccgggaagttggtgatggacggcacatggcggtagagcgtcatcagggaaaagagcagctcgtccagatcctgaggcggcggcaggcggaggaaggcgctgccctggcggacaaacgctccgtagtcgggcaggatgtaccgggggcggtagggggcgtgcccctcaaagaggtcgttgatggcgccggtctcaaagaaatggcgggtgcggggcgggatgtccagcacgtcgaaggcattttccgcctccttggccaggttcatcagcttctgctcgtgggtaagggtctgcgaggtcagggtggcaaaggcgctgtcggaatgaaacatgaaaatccctccatcagtgtatggcccggccgtcggccaggcgccgctccagctccgcgcggagccggaggtattggggatggctgagctgaatttttccgctctggatgtcgaggaatccccgctcccggagggcgcgcaccccgcggttgaccgtgcgggagcacaccccggtctcgtcaccgatggccgggcgagtcatggggatgcaggccgtcccgcctccggcgttggcctcataccaggagaccaggaaggagagaaggcggctgtcgctgtccagagacaggtaaccccgctcccggcgggcctgctcccacaggctgcgcaccacctcccgtacccgggagagggtggtgtcccggccggagaagaaccaggagaagtagtcctcccgggcgagcacccaaaaccggcaggcggttctggcacgcacctcggccagaaagcaatttgccccgcacagggcctcgtactccccgaagagggtgagggggccgaactcggagtaggtgtgggaggggcctccgggctggagcccggaggcgtcggcccggccctccaccagcacatagacgcagcggcagggggcgtcctgccgcaccaccacctctccggcggcgcaggagagcggactggccggtgtttcatccggcaggccggaaaaaagggatgccagccgccggcgcagcgtgggagactcctccgcaagcagctcccgtatggtcatagggccgcacctcccgttccaattctgcccccattataacaagccactgcctctaaaaaaaggacatgtgtcttctttttggcgctttcttctgtggaagatcatattcttaaggatacctttatggatcgttcatagtccgttcaccaatccagggaaaaatcggcgtaagatcaacagcgtcaggaagaagtgacatcaacctcctctcatctctcttacttctctgtttacacacacaccggaacagggccggcccattgggccggccctgttccggtaaaatatgctttgatcagcctccgattcagccgggaggctgatttttttgtcccggtgtacgggagtgtccctcaaaaccgccgatcccacccagggacggggggtccgatccggggaggcggtggcagagccggcgaagcggatgtaggatgccgcatagagagggggggacaggcgtggccagactggcagagctggcagacggctacatggacgcggcggtgcggctgcggatggggttggaggaggtcagggcggagttggagaccgccgaggacggtcgacggcgggcgctggaggggagggccaagctgctccggcagatgctgaaggagatgcgggatttgcgccaactggccgaggggtattataccaggccccgggacgggacctacagcatgtcccagatttacgcgccccgggtggacagcacgaagcagtgagggggtgtggaggatgactgaggcccaggaggtgcgtgcccgggccaaggcgctgcgggagcgccgggaggagctggagaaggccctggcgggggctgcggggccgggtgcgcgccccctgcggctggagctggcccgggtaaaggaggagctggtggactgcgcccggcggctgaaggagctgatgccaagccacaaggtacgctgccgcaccacttgggcgggggtggacggatggcagtgggacaggtttcagtatcagacctgggccgagctggagggcgccggggagcaggacggccccacggagctggaccgcatgcgcctggccgtccggctggcccgggagcgggcggtgacggacaagcagggggagtatctggcccaggtagagggagggaaaaaggccgcccaggtggcccgggaggcggggcgccaccgggggacagtgagccgcaccgtgggccggggccgtacaaagattgccaaggaggcaaaggcgctgtatgaggtactccaggcccagcaggggccggggccgctggtggtggattggcggacggccgggtgctggaggcggtgctctccctgctgacgccgcggcagcagctctatctctatctatactatggggagtggctgagcctgcgggagatcggaaggctgctgcgggtagaccacgcctcggtgctccgctccatccggtgcgggctggagcggctgggaacgctggcggtgggaaccagggcggaggtgcgtgggctggaggagctggaggagcggctgatggcccacttcaaccagttggagccgccggaggaggcgctgcgcccccggcccaaggcaccggccagggcgcccaatccccggcggcctccggcggagcggccgcccctgcgggccatggtgctgcggctggtgcggggcggggagacccgcacggccgagctgggggagggcctgcgccggacggagggcggccgctgggggagcgggaagctgctggccgccctggaggggtgggtggagcgcctgcccggccggggcagggaaaaggaggggaggcggcagaagctgggccgcctgctgctcaaactgtttgaatggatcaggagggaattgtatgctgaccatcatcgaaattaaggacagggaggacggcggccatggcctgcagagccagagccaccggacggagtgctggctggaggggtggcttgccgtaccgccggagctggagcagacggcctgggactgtgcgggctactgcgacctggacatacaggacggcaagctggtgggcctgacgccccgggagcagccgcccaagccggagccggagccggacctgacgccccagttccgcacagccatgctgtcctatgcggccaccagcacagccatcccggacagctatgccctggacatgtccgatctgtttcccacctgggcggcggtactggcagacggcgaggagctgcctgaggggcgggtcctcaacgacggcggccagctctaccgggtggtgcaggcggtgacaccccaggcccaccaggccccccacgacgaggggatgctggccgtctaccggcccatcgaccgggagcacgccggcacggcggacgaccccatcccctgggtgtacggcatggattgccatgcgggcaagtgctaccgctacaacggcaaggtctaccaggtggccgagggcggggatatgatcccctgcacctggccccccgacacccccggcatgtggcagtgggaggaagtgcaggcataagatgaagggggcggatttgccgcccccttttgaaccacaggagaaaggatgagagccatggagcgagcgaacggagggaacagcaatgctgaacagccgggatattgatcggctgcgccccgacgtggcggccaactgccgcgcctggctggagctgtgccgcgcggcggggcttctggtgctggtcaccggaaccgtgcgggatgaggagtaccagcaatactgttttgaaaacggcacggccgccacgcctgtacccagctttcacggggagcaggcggggctggccttcgacttctgccagaacatcaagggacaggagtattcggattccgcgttctttcagcgggccggagagctgggggagcaggtgggctttgagtggggcggccggtggaagagcttccctgaccggccccatctccagtggagcgacggcggaaaatacaccagcagtatgatccgggcgggggactacccgcccgccatgcccccatatcgagaggaggacaccgacatgacgaaagaggaaattcaggccatgatcgacgcggccgtgacggccgcccggccgccggtctacaccagtgtggagaactgccccgcgtgggccagggagacggtgcagaaagccgttgacgagggagtgctgcggggagaccagggcggcggactccgcctgaccgacgacaacctggttaaccttcagatgctccgcaacctgggcttgctggacgggggcggggcctgatggaccacatcaacggcttcaaggccgccgtagccgctgtcctgggctgcctgaccgccctgtggggatggttcggctggctggtggtggcgtgggtggcctgtatgctgctggactacgccaccggcaccgccgccgccctcaaggcggggaagtggtcctgcaaggcggcccgggagggcctctggcacaaggtgggagccatggccgccgtcctggtggccgccatcctggacggggtgctgggcttgatcctggatcatatccccgccctgaccctgcccttcgattatacggtatttctcacggtgctggtgctggtctggtatatcctgaccgagctggggagtatcgtagaaaatgccgggcggctgggggcccctttgcctgcatggctgtccaaggctattgcagcgctggagtccggcgtggacagtaccggagataaactgacccaaggggaaaaaaaagaataaaaggaaaaagcctgtagtcaaacgactacaggctttttcctgccgttgagacagacggtttttacagtggaccggagaggcctgctatacttcaccctgtgcgagtgcttcggtgcccaatagggtaaggcggagtccctgccgggttttccctactgatatgtagccggactccgccagtcggcgaattcttaatttcagcttggcctcggtaaaacccgccgccaacaaaggcgaaaggcgaagcagggaaccgcggcctgcagggcgcccggcggcggtaagctcctgaatggagttcaaaaggaggcggtcttcctgggacagtggttcagaacagtcggtgaacgcagaaattcggtggccaaaaaagttgcgaattaaatcatttaaaagcgattgctgctgatcaggggcaatatcctgctgataaaaaatagtcaggttactagaaaaagcccgcagctcgcggacgttcccgggccatgtataatgtaaaagtctgtgctctaattgtgctggaagtcgcgcaccctcggccatggaatggagaagttccgggatatcctccacgcgttcgcggagcggagggataactaggggcaggatcttgagtcgataatagagatcctcacggaaggtaccctgccggaccatctcgttcaaattccggttggttgcgcagataacccgtacgtcaatagggatcacactggtggagccaaccggcatcacttcccgctcttccagaacccgtagaaggcgactttgaagagagaggggaatgtcgccaatttcatcaagaaaaatggtgccgttatcggcggtttgaaagaggccctgctttccccctttgcgtgccccagtaaaagccccctcttcataaccaaaaagttcgctttcaattagggtatctggaatggcggcacagtttacggccacaaaggggctttgacggcgacgcgaggcattgtggatggactgggcaaacaactccttgcctgtgccgctctccccaaagatgaggatggtctcatctgtaccagaatagtactgtgccaggcgaattgccttttgaacagcgggggagtgtcctaaaatgtctgaaaagtggtacttggctggcaaggagttcttttttacaccatgagagcaccgtttttcggaggaggacgcggcgattggggtgagcaggatgaaacagtggcggtgctggaggggggactcgaagtggaggtgcagtgtatagggctttttccctaaatatacgacttccttttcctcacgaccttcggacagggaggcggcgaggtgggccaactctggaaaacacgggagaagcgggtggccaggcaatcccttctgtccggcgggcaggagacgggcggcggcctcgttcagctccacgatctgttggttctcatccaggtggaacagagcagtgcctgtaagagcgagtgtctgggataactggcttttgagtagttggttctgggtgtggatatcctgtcggtggtacagctcagataccagttgctgcatcaccggtatatggaactggttcaaaaagtcaggcggcagattatatattttgacaatttcagcaagagtagagggagtgatatttcggtatcccaggttgatgtagacctttttgttttctggacaatagctgcgaaaaccggcataaacaacggtgtcatagggagtagtgtctatgtcacagccgggccaataagggatatagttcagatgattgatcccgagctgttgcaggttttctaccaaatcctccgcaatccgtctgggcttgtttgcaaccagcactggcgtaccttcgggcagttccaaaagccgatgtaagtgattgctgtccaaaaaacgccgggcaaatatgatttggctgtttggaaaatatttgtcggcgtacgcaagggaggtaatattgaccaaaatagcggcgggttctgccgcaagcgtgtgtacggtggcaagggtaacagggacaatatccagagacgaggaaaaaacctgtgagagaattttacacatatagttacggtccagctcgttttccgtaaaaacaccaagagtttgtttggccatagggtgtccctccttgaagcgcatgggtgaaacattgcctcttaaaaggataacagacagagcatggcccgtcaatgcaatttggacattattaaaatgatttaagatatccagatatgagatacaaacagatgtatgagaagaaaaggataaaacaaatttgtgagattactccaaatatctgaaaagtattttggctaaaaaataaaaaaagtttaaaaaggattcatttgcagcgatatggaattaaaattgcttttgataatagcgtctgagggacctcggagagctgccagcgtacagcaggttaataggcaacaaagtatgaggaaaggaaaggcagaaaatggagttgggaatcaagggaaagagagcggtagttactggggctggtcagggtatcggccgggaaactgctctggtcttagcccaggagggtgccgtggtctgtgtaagtgacatcaatgacagccgcggaaaagaaacagtggaggaaatctgtgagagggggggaactggaatctatattcatgcggatgtgggggtgccggaggagatcaagcacctctttcggacggctgcagagcggttgggaagcgtggatattttaattaataatgcagcgatctcccccaaagttccatttgaagatatcccgctggagcagcttgaacaggttctgcgggtaaacctaatgggggcatttctctgtgcacaggaggctgcggcgcagatgaaagaaaaacgctggggacgcattatcagtctggcctcaatggcgggacgttttggggcaaataagtccggagcgcactacgccgctaccaaggcgggaatcgttgggatgactctaagtttggcaaagacactggggccgtacaatatcactgtaaactgcgtatcgcccggccgcattaatacggaacttacgagggtgctgccgcagaaagtccagaacgaaatctgcagtcagatacctctggggcgtattggagagccgtcagaagtagcctccgtaattgcatttctggcatcagagcaggccagctatgtatccggctcctgcgtggatgtgctgggtggttatatcgcataaagcgaaggagaataaaagaaaaggaggctaaaacaggcggcagagcaatggaaaagagagcaaaagacgtttttgtgaggtggaaaacatgttgacaatcatactggtggtagggtacttcctgttttgcgtgggcatggccttttttctggactacagaaccaaaaaaagaaaactgaatgaaaccgcagtggagtactctaccggtaaaaacagcatggggttgtttatggctttctcgctgatgtgcggcaacctgatcagttccagctacattattggcaactcatctgcagttattgagcatgatatcgcctatcagtggaccttctacggctatatcatcggctgggcgctgacctgtgcctatatccccatttatcgctccatctgctataaatatggctgttcctccttgggggaaatctttggaaagctgttcagcaagcgggtatccgtctgtgtgtcagtcatgatcttcgtatcttttgccagtgcggtcagcgcacagacggtcatcgtctccaatctgcttcagtccctgctgggcatccgcagcgaggttaccatgaccgtcaccattgcggccatgatcctgctggcacttcagggcggcatgaagggtctggcccgcatcaatatggtgcatgtggttgtacttagcgtgtccgttgtggcaatttttattgcggtaatgacctctgtgggatgggacttcggacaagtttaccgtgcgctggagccccagggtacctttaagctcattggaggctccagaagcaattcctacatcatcggtacgcttgccattcagccctttgttacggttgtaaatgcattgtccatctctgcggcgatcggcgccaaggacgccaagaccgcacagaaggctcaatccatcatgcctatttttgcaattttcttttttggattggtcatcatagctgcctgctgtggcaagttcctgtggcccgacatggatccggggactgcctggtacaccattgccggtcattacggtcccgccatggcggcgctggccagttgcggcgtgctggcggccagtatgtctacggcgccgacctacatcatggtaatgtccagtactgcaatggagctctatactcccctgcgtaagagccctatgagtgagaagcagaaaatgtttctgaccaagctgctcattgtggtattcggaatcctgttccagttgctcggcctgctctccagcgatgtggtggacatcctgtccaacgcgctgacagtgcgcgcggtatgcggtttgacctttaccctgtttctgctctggaagcggcctaacgagaagtccattttctacagcatggtgttgggtatcatcgtatgtgttgtctggatcgtctacggctacgtcttcggtacgagtccattcggtattcagattacctatgccggcggtattgtcgcactggcgacccagatcattgtcacgctggtcactaccaggtccggtgagcgctccgacagctaccagctttataaagaggccagaaaagagatgaaggctgcaattgccgcaggcaaacgtgtctgatagaaccatttactaagtctaaatcagaaaggtatggacaagcggatgaaaaagcatggaggaaatgtaatggccggcctgctggccgactatggtgtgacggcggtatttggtgtgcccggcgggcagactttgccgctctactacggaattttggatgaggggaaccgtatcaggcatattctcatgaaggatgagattgatgccacctttgccgcggacgcctacgcccgtatcagcggcggtatcggagtatgcgacgccaccgccggctgcggtgccatcaagtttatttcgggcttggcggaggcgtacaacacctccatccccgtcatcgccatcggttctgagatggagggggattggctggccgcccggtaccgcggtacgggctcccaagtggtagactccaaggaggtgctcaagccagtgaccaagtggcaggcgtgcctgccccatgtgaacaaaatgccggagttggtgcagactgccgcccagatggcggtcagtggccgtcccggacccgtatttatcgagtgtccatggcggcccttccgggaggaatataccgggccggactatgagagcaaccgaaaactggccagcctgcccgcccaccgtcctaccccgtcccgcgacgaaatcgacgaggcgatccaggtactgaaggaggccaagaggccggttatgctgctgggcggcggtgcttggcgttccggcgccagagcggagatcacggcgctggcagagcgcatggctatgcccgcagccgcctccctgaccggaaaaggtgtgctgcctgagaaccacccactgtccctgggtgtggtaggaagtctgggcggcaatgatgtctccagaaaaatggtggaggaggccgacgtgattctcgccatcggctttaagttcagtcaaaactccacctatggctggacaattcccaggaagggccagaaggagatccgcattgacattgacgagactgaaatgaataaactgcatactacagatgtagggctggtaggcgatgccaaggccaccctgcagcttctgctggatcggctggatgcgcagagagatcccactgctgtagaaaaagaaatcgcgaagttgtaccgcgcttggcgggaaaaaaaccggccggcggtggaggctgatgattgtattactccgcagagggtcgtctccttattgaatgaattgtgcggcgacgatacaatcctggcctgcgacgccagtttctcctgcggctgggcgggcagcttctttgacgtatatggtgcccgtcgtaccattcttccccggggcgccggcggcctgggctatggacttcctgccggcatcggcgcagcggcggcgcggccggggaacaaggtggtggtgctcaccggtgacggagggctgaactactgcttaggagaaatggcagtgctccatgagcaaaacatggatgtcaaggtggtggttctcaacaacagcatcctgggttggattaagtggtacgaggcggccatgtgggacggccgctttaccgaggtggacaccgaaaccatcgactacgccgcggtagctagggggctcaattgtaaaggcatatccattcgggaccccaggacccttcgggaagagctgaagacggcactggagctggaagggccagtggtcatcgacatcaccacagcggaaacggaagcatgtaagtttacggatgatccaaaggctgtggcctatatccgggagagcgcggagcagaaaaagcgaaagtaaaggcagctggatatgaaaaggggaaatatgccatgaaagaaatcatatggaagccggagctgcaccgcttttcgagctgcaaggagttcgtggaggaattccggctgggtgcgtccgacctgatcctgaccaacgagtacatctaccagccctacttcggggcgatgaacctggagtgtgccgtgctgtaccaggagcagtacggcatgggtgagcccaccgacgtgatggcggaggccatcctgcgtgatgcggccgccacgggctgcaaccgggttgtggccatcggcggcggcacggtcatcgacatcgccaaggtgctggcggtgggcggcggggagagcattgacgagctgtacggcatggcgccggagctgcccaagcggcgggagctggtcctcatccccaccacctgcggcacgggcagcgaggtgaccaacatctcaattctgaaccggacccgcctggggacgaagatggggctggtgggaccggccatgtacgcggacgcggcggtgctcatcccgcagctcctggaggggctgcccttcggggtatttgcgacgagctcgatcgacgcgctggtgcacgcggtggagtccagcctgtcgccgaaggcgacgccgtataccaagctgttcgggtataaggccattgagatgctcatccggggatatcagacgatcgcccgggaggggcgggaggcccgtctgcccctgctggaggacttcctgattgcgtcgaactatgcgggctttgcattcggtacggctgggtgcgcggcggtgcacgccatgagctacccgctggggggaaaataccacgtgccccacggggagagcaactacgcgatgtttaccggcgtgttgaagaactacatggagatcaagcaggacggcgagcttgcggtgatgaaccgctatctggcggagctgctgggctgcggagttccggaggtatatgaccggctggaggacctcctgaaccagattctgcccaagaagccgctgcacgcctacggggtgacggaggcggatctggaggagttcaccaggagcgtgatggagacccagggccggctgatgggcaacaacttcgtccctctggatgcggcgcgggtgctgaaaatctatactgagctctattaaacggcagtagggcggcggaacttccgccgccctactgccgtctcagacactttttataagaaagaaaaacaggggttgacttttgtgtaacacaagggtatagaatggggcatacagggggaagagggccgcaggagcgccccacggagcggaacgggtgccgcagtccagtttccgcgcggaggcgctcccggcgggcctcgcacgatcttaattgaagaaggagcaaagggctatgattaagtacaaagcaaagaattccttgaagtctccccggtttgccggtgtaaagaccttcatgcgcatggagcacgtggtcaccaccgccgacatcgactttgccgtggtcggcatcccctacgacacctgcgcctccttccgggtgggcacgcgcctggggcctgccgcgatccgcgacgcctccgccctggcggccaagccctttaacggcccgctgaatgtgggtatttttgactggtgctccggtgtggattacggcgatctggggtctgtgcccggctatatcgaggagtcctttgagctcatcacagagggaatgctgcccttctttgagaaggggattgtgccagtggccatgggcggcgaccacagcgtcaccctgcccgagctgcgggcctgcgccaaggtaaacggccctgtggcgctgatccactttgacgcccactacgacaccattcacgagtacttcggcaagccgtacaaccacggcacccccttctatcacgcggcgaaggaggggctggtggacacctccaaatccatccaggtgggcatccgcgaggggctgtacggcccggaggatctgaccaactccaccgatctgggctaccaggtactgcgcgccgacgagtgccacaagatgggcatggaggccgttctgaaggccatccgcgcgcgggtgggcagcgccaaggccttcctgaccttcgacattgacttcctggatcccgcctatgcgccgggaaccggtacgcccgtacccggcggcttcaccaccgcccaggccctggagctggtgcgcggtctggcagatctgaatatcgtgggctatgacgtggtggaggtctctcctccgtatgatcccaccggcattacctccattgccgcggcgggcctcatgcaggagttcatctcccacgtggcctataaaaagaagaacggcattgtcttctaattttttgcactccacctcaactctctatattctcttttcgcgcaaaatccatccgggcccggccgatttttcggccgggcccggatggattttgcgcagagcagaaagacgccggcggagccgctaagactccgccggccgcaccggcacctggatctccatcagcgtctcgtcgggatcgctggtgagggtgacgtcaattttgtagaactgaaaaatcattccattcaggacccagccatgctccgccatatatgtatgcaggcgggcaaaggaggggtggtaccgctccagctcgcctctgcggtaattcatacacaggtaatcccccgggggtatcgtgcgcttatgttcggactcaatggcgtcacgctccacaaagatcatggggacggcgggaatataatcgtcgctgggctccagcaggtgccagtctgcatagacgccgatacggtcgctggccaggataggggccacctcatccaggtagcgctccagccgggtgaaggcaaaggcgtgctcccgggagccgccggcaggctctccgaaggtaatcatataccgctggggaaaggcgcggcagaagaccttgtccaccggcgggggtggggtgatctcactcagaaagtggagcttgcggcgcagaatttcgctgagaagctgctgtttgcggatctcctcctccagcagctccaactgatggaggagaagctggtgggatttcctcaaattgcggcccgaaaaatagtcggtgatgtcgtggatggacatgccaagctgccgcagctccttgatggtgccaagtttttcgtattggcggatggaatagtagcggtagcgggtttggggatctacatagtccggtgtgatcagtccaatacggtcatagtaccgaagcgtttcgctggtcacttgccgcagcttcgcaagctctgtgatggacaacagattttccttgatgggactcacctcctgcgcggataagacattctatcacaggcggtcggacctgtcaaaaggctcttatattagtgaaattaaataaaaatagcaaataattactgtgagaataaaacaaaatgctgcacgagagagaaagatgcattgacttttgtgtaacacaaaggtatatgctcgttacagacggaaagagcggccccccctggccgcactttttcctcagactcagcgcctcactgcggcaattccccaattccactttgttaaaacagagaacaaacggagggctttattatgcaggaaaataatatgtccgtttttggcaccgtgatccgcaacgaagagattgccgatttcatgcgccttctgaatctggcgcgcgaaatcttcaagcaggagctgacggtggtggagatcatgccgggcggcctgaccaataagaatttccgggccgtgaccgaagacggcacccagattgccatccgcctggccggacagggtaccgccaactatatcaaccgccctggtgaaaagcacaatgccggtgagatcgccggactgggcattgcgccggagatctattactacgatcccaagacgggttcacaaattgttgagtacattgatgcgcccaccatgcaccccgtggactttcagacccgggacgaggtactggtcaaggcgggagcggtcatgcgccgctatcacgacagcggcctggagttcaagacctcctttgatcccgtcgccaagattgacgagtacaaggccatcctggacgagcacaactacgggaagcgctacgagggctgggagcgcatggtggaggcgctggagtgcatccgcgccgcctacgccaagcagccgccccgccgggtgccctgccacaacgacgcgctggcggagaacttcatgctccagggcgagcagatgcgggtcatcgactgggagtacggcggcatgaacgacggctactacgatatcgcctgcgtctgtgtggagaaccccctggacgcccgctgcgaggatgtgttcttccgcgcctactgcggcggcgaacccagcgaggaggccaaggcccgcctgctgatcaacaagttcctggtgacctcccactggtctacctggtcgctggttcagatctgctacggcaaggacgcggacttctactgggagtacggccgcacccgtgcggttcaggcatgctccttcctggacgaccccagcttttcccgcagcctgaccctgctgggcggctgacgggcaggaggggcagcccatggaattcatcggaacgctcattacctatctcatgatggcctgctgtgtcgtcggcggaatctcctacattgtcaatgaccagtcggagctgggccgggcctttcaggacggcctgcacgccatggcgaacatgttcatccccatttgcgggctgatggcctcggttcccttcctgaaagtcttcatctccaaggtgttcgggccggtattcgccctctttggcggagatccggtggtagccgccgcgatcatcatgccgccggactgcggttccttcgccctggccaccgagatcggccagagcgcggatctgttcccggtgatcatcgccatcggcttcatgtgcgcctctaccatcgccttcaacgtccccatcggcctgtccatgctggacaagggggatcacaaatacctggccctgggcaccatgagcggcttcctctccgtgcccttcggcgtgttcatcaccagcgtcatcgtgatgtttacccacccggccatccgttccaccttctccagtgtgggcgagccggatcatgtggtgatgctgaccctggggatgctcctgcgcaacatgatccccctggtggtcatctgcgtgctgctggccctggggctgaagttctttcccaacgggatggtcaagggcttcatggtgtttggaaagctgatgaccggcgccctcaccctggtggtggtggcctgcatcctccagcactacaccggcctgtttaccgacattctgggcgtcggctggggctttgatcccatactggccgacgaggagaacaccttccgggccgtggagctgctgggcaccatcgccatgatgctcaccggcgccttccccatggtgacgctgatccgccggtatttgggcaagcccctggaaaagctgggccgtctggccgggctggaggccagcgggagcgtgggcctggtggcctgcctgcccaacggcctggcgatgttcccctttgtaaaggagatgcgcccccgggacaaggtggtgtgtatggccttcctggcctgcggcggatacagcctgggggacttcctggccttcaacgtcaattttcagcccaatctgctggttcccgtgtttgtggggcagatttgcggcggtgtcatcggcatcctgtttgcaaagctcctggcggttccgcaggtgcgggcgctggagcaggagacggcagtgtgagacgcgcggggcgggccgcaaaggcccgccccgcgcgttgtgcttctccgtcttgggcaacagaaaaacagaaacgggcattcatctggatgccagcgttctgaaaattcaatgcaattcagatattgcaaagtctcgatgaaccaacttgaagcatgtccgggcctttgcgggccgcgccgtccccagcatgaaaatgcggaaaggggagccgtcctccgggcggtaaagatcaaagcaaaaaggacatcctgacggatgtccttttctggtggagacgacagaactcgaatctgtgaccccttgcgtgtgaagcaagtgctctaccggctgagctacgcctccatatattggtgacccgtacgggactcgaacccgtgttaccgccgtgaaagggcggtgtcttaaccacttgaccaacgggccaggttgcccaagcggggcgggatactcctgaaaggaagtcccaaaagacggcgcggtgccgtcttttggggtctggtagcggcacctggatttgaaccggggacactgcgggtatgaaccgcatgctctagccaactgagctatgccgccattgaaaaccccctgtcggacagggcaggattcagtatacgcgatcattcccgttttgtcaattgtttttttgaaaaaaattagtcaattttgtagccgacgccccagacggtcttaatgaaccggggattgcgggagggctcgcccattttttcccgcaagcggcggatatgaaccataacggtattattgcggtccaggtatttctccccccacacgctctcaaagagccgctcggcggagatgacctggccccggttctcacagagcatccagagaatgtcaaactcgatgggggtgaggcccagctcccggtcgtagagggtacactcgtgggtggcccggttgatgaccaggccgttgaagtcaatgatgtcccggcagtcgccggccttgtcggcctcgttgtagcgggtgtagcggcgcagttgggctttgacccgggccatcagctccagcgggttgaagggcttggtaatgtagtcgtccgcgccgatggtgaggccggtgatcttgtccatgtcctccgccttggcggtgagcatgagtacagggaagtggtgctccttgcggatttccccgcagagggtaaagccgctgatgtcggggagcatcacgtccaggatggccaggtccagagcctgggtccgcaccacggccagcgcctcggtgccggtgccgcacttgaacacggtgcacccctcgctcttcaaatagacctctaccagatcggcaatctccggctcgtcgtccacaaccagaatccgcgcgtccatggcatccgcccccttttccaggacattatagccaaagcggcggcggcaagtcaagggcggggcgtaattgtaagaaaaacatcagaactcctgggcgcggccaggcgaaccctggccgcgcggagcggttagcctgacgcccggttcattttctgaatcaccaacccggtctgcacattccggccgtccacactgctgctgtaagtcagggagaaggtggtgggggccggtgcgtaaaagctgagtgcccgggctccgcctgcagtggagtcgcttccggcggtacggaaatagatgcccaggtcgatgcgggcctggccgttgaacgacggggtgatctgaagatacccaggtgaggccaggatcacaaacacgtcgaagaagacttggtaatagccgggctggagccgaagctgctgggtgccgctcagtgtgatattgcctgtggggtcattcagcagctcatagagcggaatctgtccgttgttggggacggatcgtacatcggagtagtaggaagcaaagacatcctcacccggtccacccgcaggaccagtggggccagtggcgccgggcgtcccctgcgggcctgtcggtccggtcgcgccctggggcccctgtggcccggtggctccggctgggccgggaagtccctgcggcccggtggggccgtccatgccccggatgccctgagggccggtgggcccggtggcacctgccgccccccgcgggcctgtcggtccggtcgcgccctggggcccctgtggcccggtggctccggctgggccgggaagtccctgcggcccggtggggccgtccatgccccggatgccctgagggccggtaggcccggtggcacctgccgccccccgcgggcctgttggtccggcggcgccctggggaccctggggcccggtggctccggctgggccgggaagtccctgcggcccagttgggccgtccatgccccggataccctgagggccggtaggcccaggcacaccctggagaccttggcctccggcagggccctgcggccccgtggttccagagggcccggtggggccctgcgctccggcggtgccctgggggcccgtcggtccccgctccccctgcggcccggttggcccggtggggcctgtgggcccggacggggagggcggacagggcggatatggggggcagggcggcggacagccgcaggggtcaaaacagtatttcatgacaattacctcccgggccattctatgctgtgacccaccccgccgccaaaggcggctagtgacttttccgaaaaagggtggtacaatcatttttagtataaatggaggcatcctatgaatgagtttgacgccctgctggcccgggcggtggagcaggccagagccctcggtatcccggtgtcggcccgcatctccccccatgtggcggtcaaccgccgggcagtgacccggttcggctgctgcatccggcggggcggggagtatgtgattgagctgtccgagcggctgctggaggcggaggagcgggcgtgtatgcagaccctggcccacgaggtgctccacacctgccccggctgccgcaaccatggggccctctggaaggagtacgccgcgcggatgaatggggcctacggctatgccatctcccgtaccggcacctgcgaggcgctgggggtggcagatgtgcggccggtgcgctaccggctggtgtgcgagcgctgcgggcaggagttttgccggagccgccgctccccgctggtggatcacccggagcggtaccgctgccggtgcggtggcgtgctgcgtcgcagcaactgaacctgtctggagaaggtgttcccaacggaaaagaaaagtaagaaggccctgttcaatcgtattttctccatcgccggcctgtccatcggcggcgcgattctggcggggctcatcgtgtatgtggcccgtactatggatgtgcgggccctgctggcctccatccagcccctgtggctgctgggggcagccctgtgcgtccccctcagcgaaagcgtggacgcgctgatcttttacggtatgggccgctcggcgggctgtcccgtcaagttggcgggctgctttgatgcggcctatattggggagttttactacaagctgggccccgccggcgcgccggtgcagctcaagctgatgtacgatgcgggcatgagcgccacctacaccgcctccatctacacctggaaggcagtggccaacaccatggtttacaccggctatgcagtggccgccctggcctatgagctgttctggcggcgggaggggctgggccccgccgtggcgggggcgggggcgctgatcgccctctacgtgtttctgtgcgggctggccctctttaccgccgtgcggccggagcctattcagcgtctgatccgccgcatcctcaccttcctcgcccgccactggaaggtgatggccagggagggcatggtggacaagggcatggaaaaggtggacgagttctgcgcacagctccgcgccctcaagggcaaccgccggatgctggcgggcctgttcgcgggcatgtttgtggagctgacggccctgtttgccattcccttcttcctctaccgggggctgggtctgacagggggctccttctgggagctggtgctggtccagtgcctggtgctggtgctctcccgcatcatcatgctcccaggcaacgccggcggcgcggaggggagcttctacctgttcatgggccccctgttcggccggcatctggcggtggggctggtgctgtggcgctttgccgcctttctggaggttctgctgctgggcggagcctggtcggtgctccgctttgcgcagcgctcggcggccggacacgggacataggaggagaacgtcttggatggaaaatatacccgccttaagctgaaaatgctgctgcttgtggtgctgggcaccctgatcgcggggggcgtgggcatctttctgctggaggtggtggtggatggggtgctccaggaccccttcgcccgctttttcctctgggcggccaccaccctgttcggccagagcccggagggggcggcggagctctaccagcgctatatccgcaacaacaagcaggagatcctcaccctgggtaccatgctgctgatgctcatcgccttctacctggccatgggccggtttacccgctggctggacgacatccgctcggccacccgccggctggtggaggcccaggcggagccggtggagctgccccgggagctggcccccatccaagaggatctgaatgccatccagcggcagctccgggcgcgggaggcggcggccagggagagcgagcagcgcaagggggatctggtggccttcctggcccacgatctcaagaccccgctgacctcggtggtgggctacctcaccctgctgcgggacgaccccggcctggacgccgcccagcgggccaagttcaccggcatcgccctggacaaggcccggaggctggaggagctgctgggggagtttttcgacatcacccggatggatctggacagcgggccgggggagcgccagcccatccagctgtccatgctgctggagcagctcgccgacgagttctaccccctctttgcggagaagcagctccggtgcacggtggaaattcagcaccacctagtggtgctgggagacccggacaaacttgcccgggtctttgataacgtgctgcgcaacgccgtcagctactccacccccggcggccgggtggacattcaggccaaaaccgtagggcgtcaggcggagatcaccatccgaaacgaggggctggagatccccgagggggagctggccaacatcttccagaagttctaccggctggacgccgcccgctcctcccgcaccggcggggccgggctggggctggccatcgccaaggagatcgtggagagccacggagggaacatccgctgcgagagcaacgggcggcttaccagcttcgtcatctctctgccactttataaggaggtgcgccatgtctttaaacgaaaccgcgctggcctgtctgaaccgaaataggctgctctacttaaacatgctggaggtgctgcgacggggctcggcggagctgctttgggccggggagggcggggtgctgctctatgaccgggggtcgggggcctacatgcttaccgcccgggaccgggccaccctggatgggatgctccccctgctgcctgcggactgtgacctgctggtgggccacgacctctggtaccgggacgagctggccggccgcttcggcctgtggaaggaggagctgtgcgtccaggccgcctggatggctccggagccgccggaggcgccggctttcggcggggagctgcgccttttgggggaggagtgggccccctacgtctgtgagcactacagcaagagcgatatcggcggcctggagcacatccggcaggccatcggcgccggtatgctgggggccttcgtggacgggacgctggcgggcttcgcgggcttccacggcgagggctccatcggccttctggaggtgctgcccgcctaccgccgccggggcctgggggaagcgctgctccggggggcggtgcggctggcgctggagcgggggcagtatgcctttggccaggtgcttatcgacaacgccccctccctggccctccagaaaaaggtgggcatgacggtcgcccgggaaccgctcttctggctgtttcgcagataaagagccatttggaccggccggaagcgttcaacagacctttttgacgggcaccggccccggcgcttttcgaaagcgccggggccggtctggtcagatggcgtggtagtcctggagcagcttctccaggtcggtgccatggagctttttgagtaccgccttgagggcaaggcgctcggccgggttcagccccagctcggtgagcttgcggccgtcccgaagctggacagaggcgttgatcagatcccgcacgtcgtaggtggagccccacacctcgggcacgccccggtcgatgtccagcagggtgtagaccgcctccataccggtgcgcatggagtactcggtggtaaagatggtgtcccgctccgtctcggcgaactgccccaggaaggcgaagttcaccgccccgtcggggacgacgcggggccggtccccggcggcacggggcaggaagaaggcggtgatgtagggcatcatgcaggggacggtattggcgctgtgggcggccagctccgcaatctcctcctcgggcacccccatgtggtagagccactccatgcagatctcccgcccggtgcactcccgcatgggctttttcacaaagttgcccggcttgtcgctgaacaggccgtagatccacccaacgagctgccccctgggctggtcgcggaactggggctggcggttgaaggtccagctcagcagccagttggagtccctggcggtgacgatgccgccggtgaccaccttcccggagaaggggtcccgctggcagatgcgctggacataggggggaattttgtcgtcaagggtggtgacggtggcgctcatccagttgctcaactccggctgggagcagaacttgtccggccggccgaaggcggggtcccgcgcggcgatgcgccgccacatgtcccagccgccgccgggcttcagctccggccggaagggggcaggggaatcctgggaacccagggcggaattctccacgcagccgccgggagtgaggaaaaccaggtcgttttccgtcagatcaatgtgctcctctgccccgtcccgcagcagcaccaggcggctggcctgcttgcggccgggccggaggtcgaactccacgtccaccaccctggtgttgaagtggaactggacgccatgctcctccaggtacttgagcatggggaggatcatggactcatactggttgtagcgggtgaagcgcagggcggtgaagtcgggcaggccccccacgtggtggatgaagcgcttgaggtagagcttcatctccagggcggagtgccagttctcaaaggcgaacatggtgcgccagtagagccagaagttggactccagcaccgcactgctgaacacgtccgtgatgcgcttgtcgtacagggcctcgtcgggggtgaagaacagcttcatgatctccatggcgccctgatcgctcaggccgaacttgccgtcggtgtgggcgtcctccccccggttgaccgtggcccgcatgagggagtagttgggatcccgcttgttgagccagtagtactcgtccaggacggacacgccctcggtctcgatggacgggatggagcggaacaaatcccacatgacctcgaagtggttgtccatctcccggccgccccgcatgacatagcccagtccctcgtagtgccagccgtcgcaggcgccgccggcgatgggctccttctccaggatgtggatgttccggccgggcatctgcccgtcccgcaccagatagcaggccgccgtcagggccgccaggccggagcccaccagataggccgatttatgctccacgccctccggcttcaccgggcgggcaaaggcctcgtaattgccgctggaataatacatgaaaatgcctccgtttcatagcgttgctttggattctggggccagtatagcccctccggaacggcggcgcaatcagcagaggggccccggtgatggaagtttcatcaccggggcccctctgtctcaattttgatcaaacgggcccgcctgatgggcggaatccgcccgcaggcgctccagcgcctgggcaaagctgcccgaaaccaccagctctacccggcgggccagctccgccggctctcccttcatgccggtgcggatccagtccagaaccagccccacaaaggcgtacttgtagaagtcggccagaaaggccttgtcctcctcccgcacctctccccgggggtccagctcctccaccacgcccatgagcaggccgtgggtgacctgaaagagaaaggtctccacctgctcccggcggacggagcggtagacgttgaggataaagggcctgttgtcgatcagcccgtccagaatccggcggaacccctcctgccaggtggtataggtgcgcttgccatccagtatccgccgggcgtcctcctggcaggcccactccaccaggtcgtagatgtcccggaagtggtagtagaaggtcatgcggttgatgccgcagtcctcggcgatgtcggtgacggtgatcttgtccagcggccgctccagcagcagcttcttgagggaggcctccagggcccgcttggtcacctggctcatggctcacctctggtccagcggcacaaaggcgcgcatgggggccaccgccttgtaggccgggcggatgatgcggttggcgggctggcagacctcctcgatgcggtgggcgcaccagcccaccatccgggccacggcgaacaggggggtgtagagctccatgggtatgcccatcatcttgtaaaccagtccggagaagagatccacgttggcgcacaccaccttctcctcccccttgacggtgcgcagcacctcgggggtgaggcgctccacccgctcaaagagctcaaactcgtccagcatgcccttggtctcggccaggctgcgggcaaaccgcttgaggaggacggcccgggggtcggacagggtgtagatggcgtggcccatgccgtagatgaggcccgagcggtctcccgcctccttccgcagcaggcggcccaggtagtcccgcaccgcgtcgtcgtccgtccagtcggacacctcggcctcaatgtgtccgaacatctccatgaccttcttgttggcgccgccgtggcggggacccttcagggagcccaccgccgccgcgatggaggaatagatgtcggtgccggaggaggagagcacccggcaggcaaaggcggagttgttgccgccgccgtgctcggcgtggagcaccaggcacagatccagcagccgggcctcctcgtcggtgtaccggttgtcgtggcgcacggagtagaggaagttctgcgccacgctcagcccctcctggggccggtggaggtagagggactcgttgtcgtagtagtgccgcttggccgcgaaggcgtgggccacgatcaccggtacgcgggcaatgagctccaccgcctgccggagctggttgggcagggacatgtcatcgggccgcccgtcataggaatagagggccagcaccgagcgggccagcttattcatcacatcggggctgggggccttgaggatcatgtcctcggtgaacatgggaggcagggcccggtgggcggagagcagtccctcgaaggcggtgagctgggcccgggtgggcagggcgccgaagagaagcaggtaggcggtctcctcaaagccgaagcggccctcactgacaaagccgttgatcagctcctccacgtcgataccacggtacaccagcttgccgggggcgggaatccgctcgccgtcctggacgtaatagcccatgacgttgccgatctgggtcaccccggccatgacgccggtgccgtcggcgttgcgcaggccccgcttgacgcggtagcgctcataaaaggccgggtcgatctggttatgcttctggtactccgcgcatagactttcaataaagtcggcggaggcgtccctgaccgcatggtccatatgcaacagctcctctgtctggtttcatttgtcccatattgtattctcttttcatcaaacagtcaatctgaaaaaagcaaggacgggcgaaatctgaatgatgctgaaacaaaacttgcaaaaaggagggggcggagggggaatgaagcaggtggtggccaccgccctggtgctgctgctcaccctgtttctgttgccgctgctcctgctgggggaggagccgcttgccgggccgtcccagccccccgccgccaccggcaccctgcccatcgaccgcaccgtggtcacccccggccagacggcggacggccgggtacaggtgcgggtggccctgggggacggggaggtgctcaccctgccgctggacaagtacctgtggcgggtggtggcggcggagatgcccgcctcctttgagccggaggccctcaaggcccagacggtggccgcccgcacctacaccctctccaagatggagcgcaccgtggaggcccacccggacgccgacgtgtgcacggacatcacctgctgccaggcctacatcgacccggcggacgccgccgccaactggggggagaacgcccagacctacaccgacaagatcgccgccgccgtggcggataccgacggcatggcggccctcttccaggggcaacccatccaggcggtgttcttctcctccgccgccggaaggacggtggacgcggtggaggtgtggggcaacgcggtgccctacctcaccagcgtggacagccccgagggggacgaggtgcccaactaccactccaccgtcacggtgcccctggacgagttcaaaagcaagctgctggcccagtacccgcaggccgacctgtccggcgagccggcgggctggtttgccaaccttgtccccaattccgccggcggggtggagacggtggacatcggcggcgtcaccgtgggcggtggaagcctgcgcaccctgttcggcctgcgctccaccagcttcacggtctccgcctcggcggatggggtcaccttctccgtcaccggctacggccacggcgtgggcatgagccagtacggcgccaacgccctggccaaggaggggaagacctacgacgagattttgaagtggtattacaccggcatcgacgtggccccctatacgccccagagatgacaggcggccccggcggcatatgccgccggggccgcctgaggttatcgataaaccctcctgccgaagatttcggagggaaggatagtgtgaaagggaaccgtcagggttccctttcgcgttggatcaaaataactgtttgaaacttttctgaagtttcaaacagtttggcagcctgtcgaaaaggcttttttgacaggctgaggcggccccggcggcacacatgccgccggggccgctgcgtcagaaagagaggccgcgggcttcctcataggcggtgagccacggggggctgttggcggagtcgtagccggtggggaggatgccggcgctgccgacaaagctgccgccggcgtcatagacgtattccatatagccgtagtcctcaaggctgccgccgatcacgatgtcgtgggcggagccgtcggaggcggtataggaatagacatacggctccgcctccgagaattgcccggtgatgtcgagctcctccccggtttctgtggtgaaatagacgctgccgccgcgcacagtgaggagatcaggctcctcccttaccggaaagcacacgttctcctgggatggtgcaaccgttgctccggcgtccggttcgttccagtttacgctgtcggttgatgtaaacgctccgccggagagcagcgggatggagcccagcgcgccggaggcggccagggcgcccgcagtgagggcggcggccacagcagcggcggcgacgaggatgcggatggggcgtctgggtttggtggtcatggcagttacctccgattcggtatgggagcagcgggaggccagggcgcgccgttgctcctccacccggttgaggggggggcaggtctgggccaggacttgctcaaaagtcctctgatagagcttcttcatagccgagttcctccagcttcttcctgagttgttgtttggcccggtagagccgggcggagagcgccggggcggtggtgcggaactggcgggccagctcggccaccgtgaacccctcgtaatagcgcaggtggagcagggcccggctgtcgggggacagcgcccccagggcggcaaacaggccggcctcctccggcgtctcgaaggtcagccgctccagggccgtgtcgtcgttctcccgccgcctgcgccagggggaggtaagcagatcccggcagcggttgaccgccacccgggccagccaggggcgctccttccctggggcagggggcttctccagcagggtgagaaacacctcctggcacacatcctccgcgtcctgaggcgagcgggtatagctgagggccaggccgtacaccatggggcggtattggtcgaataggggaagaaattccgcttcggtcatcccggagcctcccttcgtcgtttgtggccacatcaataagacggcggggcgggggcggatctgacggccccggcgggatttttcgggaaaaccgcattgtaaaccggcccgtcctttgttataataccatattgggacggagcgcaccgcccgatccctaatctgttgtaaagtgagagatcgcacatgaacacacgctatgacgttgccatcatcggctgcggcgaggccggcatcttcgcgggctatgagctgatgcaccgcaacccgggcctcaaggtggttaccctggatcagggggccgacatctatacccggagctgccccatcgtggcgggcaaggtgaaggagtgcatccactgcaaggtgtgtgacaccatgtgcggcttcggcggggcgggcgccttttccgacggcaagtacaatttcaccaccgccttcggcggctggctcaccgacttcatgcccaagcgggaggtcatggagcttatcgactatgtggactccatcaacatgaagcacggggccaccgaccaggtgttctccaccgagacccccgccgcccaggcactggagaagaaggccctggagtatgacctccacctgctccaggcccggtgcaagcacctgggcaccgagaacaacctgaagatcctccagagcatctatgaggaggtgcgccagggcgtcgagttccggttccgcaccgccgtcaccaaaatcgagaacctggggaaggagggctaccgcctcatcaccgacaagggggacgaggtggactgcacctggctcatcgccggccctggccgctccggcgcggagtggttctccaaccagtgcaaggagctgggcatccagctcatcaacaaccaggtggacatcggcgtgcgggtggagctgcccgccaaggtgttcgagcacatcaccgacgtggtgtacgagtccaagctggtctaccgcaccaagcagtacggcgaccaggtgcgcaccttctgcatgaacccctacggccacgtagtggccgagaacgtggagggcatcaacaccgtcaacggccactcctactccgatcccaagctgcgcagcgagaacaccaacttcgccctgctggtgtccaaccgcttcacctcccccttcaacgagccctaccgctacggcaagcacatcgcctccctgagcaacatgctggctggcggcgtgctggtgcagcgcttcggcgatctggtcagcggcatccgcaccaacgagcaccgcatgagcaagtccttcgtccaccccaccctcaccgccgccgtgcccggcgacctgtccctggccctgcccaagcggcagttggacgacatcattgagatgatctaccagcttgacaagctggcccccggcaccgccaactacgacaccctgctctacggcgcggaggtcaagttctactccgcccggctggccctgtccaacgagctggaaaccgccctgcccggcttcttcgccgtgggcgacggcgcgggcgtgacccgcggcctggcccaggcgggcgcgtcgggcgtaaaggtggcccaggtgatttcggagcggctgaagtaagccccgccggcacccacccgattcggagtgctcgaagcagatttgacatctccagagaacggccgccgcaggcggcccctgcccgccggcagcccagcgcaagcgggtgccggtgggagcggaggagcaagggagcggacgcaggttttgccgtcaggcggaaccggagtcaagcggactttgcgacgacgcggcccaggcgggcgcgtcgggggtgaaggtggcccaggtgatttcggagcggctgaagtaagccctgccggcacccacccgattcggagtgcctgaaataagcgtgcgttcaagtgcggcgccctcccctgcgggggagagcgccgcctttctgcacccctctgccgccggtgcatagaatggcctgaacggaaacagacagggggacgggtatatggacgaccggatacaggagctgctggagcgggcgcgggagaccgccgccaccgccggggagtacgccggacagatggtggacacggcccggctgcggggaaggctgttcgcccttcggacggacatcaacggcctgctccatacggcggggcggctggtgtacgacgctcaccggggcggcgccggcggagaggacgcgctggagcaggtgttctcggagctggaccacaaggaggccgcggcggccgagctgcggagccggctcgagcgcctccggcaggagaagccgctctagccgcggggaggcgggacccggacgggtcccgcttttttgcggctttttcggaaagggggcgggaagttgccctttttcattgcttttttggcggacggggtgtaaaataccatgtaatccttgcggccgcagtgcttgcggcgaaccgtcagaccgtatttcgggcccgtccgggccgcttattacaaataaggaggacaagctttatgaactacacgtttgcccaataccaggagagcgcggactacatccgcagccagatcggcggctttgcccccaaggtggccatgatcctgggttccggcctgggctacatgggcgatattgtggaaaaccccattgccgtgccttatcagaatatcccccatttcaaggtgtccaccgcccccggccacaagggtcagctggtgttcggcaccctggaggggcagaaggtggctgttatgcagggccgtatgcaccactacgaaggctactcctatgaggaggtgtcctacgcggtgcgggtgctccgcctgctgggctgcgataccctgatcgtcaccaacgccgccggctgcgtcaacctggattggaaggcgggcgacctgatgcttattgccgaccacatcaagttcttcatggagtcccccctgcggggtgagaacctgcccgagttcggcgtgcgcttccccgacgcctcccacctctacacccccgccctgcgggagatggcccgccagaccgccagggagctgggcatcgagctgcgggagggcgtctacatgtacttccccggcccccagtacgagactccggcggaggtgcgggccgcccgggtgctgggcgccgacgcagcgggcatgtccaccgcgccggaggtcatcaccgccggccactgtggcatgcgggtgctgggctttaccctcctgtccaacatgggcgccggtattctggaccagcccctctccgagcaggaggtgctggatgcggcggcggcctgccgggacaagttctcccgcctcgtgctggcctgcctgaaaaagattgactaaaaggagcctgccatgtctattctgatccataactgcaccgccgtcctcatggacgaggcgggcaccgtcctccccaacgcctatgtggtggtggaggggacgaagatccgctccgtcagcacccagcgcccctggggctcctttgaggagcagatcgacggccagggcaacgtgctcatgcccggctttgtcaacgcccacagccatgtgcccatgaccgccatgcggggctacggcgacggcaacaacctccaggactggctgcacaactatatcttcccggtggaggcccgctgggacgaccgggccatccgggcctgtaccgacctgggcctggcggagatgatcgcctccggcgtcaccaccatcgcggacatgtatggccacaccgacgcggtggcccaggaggtggcggcctccggcatcagcgccaacctgtgctgcggcggcgtgcagttcaccgacacctttgatcccgccacccaccacgactgtgtggtgcagcgggagctgaccgagaagtggcacggctacaacgacgggcagattctggtggacgcctccatccacggcgagtacacctcccaccacccgctctggcagtggatggcggactacgcccgggagcacggcctgggtatgcacgtgcacatctccgagacccgcaccgagcatgacgagtgcctggcccgccacggcaagactcccattcaggtgctcaacgactacggcgtgtgggatgtgcgggccatcgccgcccactgcgtctggaccaccccggaggactggtccgttatggcgtccaagggggtttcggccatccacaatcccatgagcaacctcaagctgggcagcggcatcgcccccgtccccgccatgggcaaggccggtgtcaacgtgtgcctgggcaccgacggcgtgtcctccaacaactgcaccgacttcttcggggacatgaagctggccgccattctccacaacggggccaactgcgaccccctggccctgctgcccatcgacgccctgcgcatggccaccgtcaacggcggcaaggccctggggcggctcaccggccggattgaggggggctacgacgccgacctcatcctggtggacttctcccacctgaaccttaccccctgccacagcgtgatttccaacctggcatatgccgcccacggcagcgacgtgtgcatgaatatggcccgcggaaaggtcatatacagagatggggacttcctcaccatcgacattgaccgggtgaagcgggaagtggcggactacgccctgcccctgctgtttgaaacgaaataagggggcctagcattgtccaatcagcaaaaaaagaataccttttacggcgcggccgctatcctgacggtgagcaccattctggtcaagattatcggcgccatcttcaagatcccgcttatcgccatactgcccgaggaggcctacggcgatttcaacggcgcgtataacatctactccttcttcctcaccatctccacggcgggcctgcctgttgccttgtccaagacggtgtcggagtgccatactctgggccgggagaaccagaagcaccgggtcttccgggtggcattctgtgcgttcctgttcatggggctgttcagcttcctctgcatgtcagtattcggacaactggtagcaacctatatcattggcaatgagaaagccgtgttctgcgtgtgggcgctggcgccggcggtgctgtgcacctgctgctgctccgccttccggggctatgcccaggggcacatgaacatgatgcccaccgcgatctcccaaatcattgaggcgttgtgcaagctcttcctgggtttgggccttgccatggtgatcatgagcctgaccctctggccggaggacatccgcaaccggctggcggcctccggcgccctcatcggcgtctccttcggcagcgtgctgtcggtgatctatctggccttcaaccacttccgtacccgccggggcagcgccgcccgggccgccgaccagcccgaccggagccgggtggtgctggcccggctgctcaagctggccattcccatcaccctcagttcatgctccatgtccctggtgactatcatcgacaccaacctggtgaacaatcagctccagaatgtgtttaccgccattcagggcggtatgaccggcatcagcaacagttttctggatatctttcccaaggctgtggagatctttcagaacaatacggatgcctggcagcaagccctgctgacagacccggccaccaagctggacccgatcctggactctgcccgcagcctctacggcacctacagtaagaccatgagcgtctacaacctgccctttaacctgatgatccccctgacggcctgcatcgtccccggcatctccgcctgcctggcccggagcgaccggctgggagccaagcggattaccgagtccgccatgcgggtggccgccctcattgccctgccctgcggcttcggtctgctggctctgggcggccctattatggaactcatcgccctgggcaatgtggatacggccatcgccggtcccatcctgtccatcctggggattgcctccatttttgtctgcttccagttggtgggcaccgcgatcctccaggccaacggcatagtgaatctgcccatcattacggttattatcggcggcgtcactaagattctggtcaactacaccctggtgggtaatcccaaaatcatgatcttcggcgcgccggtgggcactctgagctgctttgcggtgatctccattctcaacctgctcatcatcaagcggtgcgtgcccaatccgccccgctatctggtggcgctgtccaagccgctggcggcctccgtggtaatggctgccgccgcatggggaagccatgggctgctcgcccgcgtcctgaacggcagtctgacccgggatatggcggccaccgccggagcgatcctggtgggcgtggtggtatatgtaattttagtcctggctctgcgtaccctgacccgggaggacctggaaatgatgcccgggggcaaaaagctggctaaaattctgcatatccagtaagttttttggaaaaagaggttgcaggaggccttgaaatatggtagattttcagtataaggattcttacggcgtcaaggacttggaggagattgtccgcctcttgcgggcgcccggcgggtgcccctgggacgcggagcagacccaccagtccatccgccgcaatttcctggaggaggcctatgaggccgtggaggccatcgatgagggcagccccgagcacctgaaggaggagttgggcgatgtgttgctccaggtggtgttccacgccctcatggagcaggaggccggccgcttcgatctggacgccgtggccgacggcatctgcaaaaagctcatcttccgccacccccacgtcttcggggaggtgtcggtctccggcaccggcgaggttctctccaactgggaggagctcaagcggaaggaaaaggggcaggccaccaataccgacgcgctggaggccgtggcccgctccctgcccgccctgtggcgggccgagaaggtgcagaaaaaggcgaaaaaggcgggcttcgactggccggacgtgtccggcgccctggacaagctgtctgaggagctggaggagctgaagaccgccgtggccgagggcaccaatgtggaggaggagctgggcgacctgctcttctccgccgtcaacgtctcccgtttcgtgaaggtggacaccgaggaggccctcaacggggccaccgacaagttcatcggccgcttccgcaaggtggaggaggaagccgcccggcagggccgcaccctggagggcatgagcttggcggaattggacaagctatgggagcacgcaaaagagacttaagggcgggttcgccttaagtataatcagactggggtgattcccccagtaaacacaggaggagttatcgatatgaataaggctgaactgatcaatgcggccgccgagaaggccggcctgtccaagaaggataccgagaccgccatcaacgcggccattgaggtcatttccgactgcctggccgagggcgacaaggttcaactggtgggcttcggtgcctttgaggtgaagagccgcgccgagcgcatcggccgcaaccccaagaccaaggagagcatcaagatccccgcctccaaggtgcccgtgttcaagcccggcaaggcgctgaaggacatcgtcgcgaagtaagtcagaagcgcgtagaatggtgcccccgcggcgctgtaccgggccggcggaggcgtaggggcgggtgcccacacccgcccgcgggccgatgagggcatcggcccctacgcgcggaagaggagtgggtgcccaggagtccctttcgccgcaggcggcaaagcgcaccccttccgccgcggcttcctcttcccgccgaacccgcggcgagggccctgaaaggggacgtaccccgtgttgtaggggcggggcttgtccccgcccgcgggcggccgcaagggccgctcctacaggggtgcacagaatggttcccccgcggcgctgcaccgggcccggcggaggcgtagggacgggtgcccacacccgcccgtgaggcgagtggccccatgtccggctgggccgcatccacagagagaaccacagggccgccgcaggcttgcggcggcccttgactatgttgactatggaggaggaagattcccatgcgactggacaaatggctgaaggtctcccggctcatcaagcgccggacggtggccaacgaggcctgtgacaacgcccgggtcacggccaacggccggccggtgaaggccagctacgacgtgaaggcgggcgacgtgctggagctgcgcttcggcgagcgcaccgtaaaggtggaggtgctgtcggtggccgagcacgtgggcaaggccgacgcccccgccctgtataaagaactgctgtgagggcggaccgcccccgccgcgctgagagcaaaaaacagccctcccatatatgggagggctgttttttgtggcttacttgcggccgccgcggcgggagctgcggcgctccgactggcgcagctcggacagcttgctgtccgaggcggccatgaactgcttgagccggtcctcaaagctggcgggctccgccggggcgggcttgccgcggaagccgccgccgttgtgcccgccggggcggcccataggacggccctggcctgcggggcggggcgggggatccatagcctttttgatggagaggttgatgcggccgttctcgtcaatgccgatgaccttgaccttgacctcctgcccttccttgagatgatccttcacatcgttgacataggaataggcgatctctgagatatgcaccagacccgacttgccctccggcaaggagacgaacgcaccgaactttgtgatgcctgtgacctttccttccagaaccgaaccaacaccaaactccatactgactgctaaatcctctctcataaattttcaatcggtgaaacggaagatatactcgcccggctctaccaggcccagcttgccgcgggcgatgtcggcctgccggtcgggatcatcgctgttttccacggcgtcggacaggtcggcgttgacctgcttctgggctgccacctgcgcctcggcctcggccaggtcgctctgggcggtcagaatctgctggcgcaggttcagcagcccggtggcggcgccgataagcagggccagtaccaccagcttggtcaggagggacgcttttttggttttcacaggcggtacctcctcccgacgcgcggcggtccgagcggtgcagctcatccatttccctggatatcagccttattctataccactttcgccgataatggaaggacttttttgcggtttttccgatttttttacacagcctcaggagaaacactaccggtagtgtaagcacacgccacaaaaccccaacgagatcggccagacggtagcccagtttgaggaaccagcggctcagcagccagaaataagccgccgcgcccaggaggacggccgccacaatgtaaaggcgcacttcgccgctgccggcggtggtggtgtagacaaacagggcgacggtgaccaccagccagaacagcaggtccagcactccacccagcagggggaggcggacgcgcacacggaggatgcggaacgcgtcgtacagcagccccaccgccgcccccatcaccagcgccccggcaaagaagagggcctggtcggtgacggatacggtcatttcagcggaagagccgggcaaacaggccgcccgccctgtcccgcccgctgtcctcgtaggtgagggagtcgatggtgccctccaccttcaaatccccgccgtccaggctcagcttctcgatgtgcagctcctccccccgcacgatgagggtgccccggttggtgagcatgacaatggtgttctcgtcaaagctctccacctcctccacgccggagactgagagctgttcgcgctcctccagaatgatgtgatgggccgcctccgcccgcggacggttttcttcgtacggcatggctctcccccgcctttccatagtcttgtctcatatatatgggacaggtgggcgggttatgccagggccctcagcggcggctgatccgaagggcgggggccaggcggcggctcaacagccaggccagcgccagcttgactgcgtcgggcaggaggaaggggaacacacaccagcccaacacggtgaacattcctaccggcccggcggagctggtgtataccgcgtagtaccagacggagccgaacaggtagcacaggatctgacccacgacggcggaaccgagaaagacgggggcggattttcccagccatcgctcggcgccccacatggtgagggcggtaaaaaggaagcccaccagatagccgcccgtggcacccagaaaggcccccaggccgccgtggaagccggcaaagacgggcagtcccacggcccccaacagcagatagacggtcaccgccagggtgcccagcctgccccccagcaggcccagtgtgagaaagacggcaaaggtctgtagggtgaagggaacggcggtggggatggagatccaggagcagacggcgatcagagccgccaggatgccggtgtaggccagttctcttgtcttcatgataggtgttccctcctgattgtaaacttaaaaatgattatagtttacatttaataaaatgtcaactaaaaagagatataggttgacgatttaggaggggacgggtacaatagagggcgaaaggaagtggagcgaatgctgcgggacgaggtgctggcgctgttaaaggcccgggaggggaagcccctgtcgggggaggagatgagccgtgccctgggggtgagccgggcggcggtgtggaaggccatggagtctctgcgggacgaggggtatgtcatctcctccgccccccgccggggctacgccctggagggctcgccggaccggctgtccgccggggagctggccggagccctggcgggccgccgggtgggccgcgcgctggtgtgcctggagacggtggactccaccaacaacgaggtcaagcgccgggccctggccggggccgccgacggcctggcggtggtggcggagcagcagaccggcggccggggccgccggggccgctcctttgtctcccctgcggggcaggggctttatctgtcggttctcctccgcccccggtgccctctggaggaggtgtcgaccctgacggcgtggacggcggtggcggtgtgcaatgcggtggagcgggtgtgcggcgtgcggccggggatcaagtggcccaacgacgtgatcctggacgggcggaagctgtgcggcattctcaccgagctggagctggaggcggagactgccgccctgcgccatgtggtggtgggggtggggatcaacctcacccagaccgcagccgacttcgggccggaggtggccccggtggccgtctccctggcccaggctctgggacgggccccccgccgggcggagatggcggcggccgtgctggccgccctggacgagctgtacgccgccttcccggcagagcgggcggcctggctggagcggtaccgggccgactgtctcaccctgggccggacggtgcgcctgctccgggcgggcgaggaggaggaggcctttgccgaggcggtggacgatgccttcgccctggtggtgcgccgcgccgacggcagccgggaggcggtgtcctccggcgaggtgtccgtccgggggctgctggggtatgtgtgatttccaaaagcgcgggacgtgtcccgcgctttttgcttgacaaatccgcctgttccgctataataagacaagttatgtgtcatgacacatgtaaaggagagacggaaatatgggagcatgcagcgcatttctcaagcgaaaaaatattgtcctctcggcaaagcggtatggagtggacgcattgggagccatggcccaggggctgttctgttccctgctcatcggcaccattctggacacgctgggcaagcagctcggcattgccttcctggtgacggtggggggctacgcctccgccatgagcggctcggccatggccgtggccatcggctacgccctccaggcgccgcccctggtgctgttttccctggccacggtgggctatgccgccaacgccctgggcagcgtcaccctgtccggcggcaagggggcgggcgggccgctggcggtgctcttcatcgccgtcatcgccgccgagctgggcaaggcggtgtccaaggagacgaaaatcgacattctggtcacacccctggtgaccatcctggccggagtgggactgtccgccctgctggccccggccatcggcaccgcggcctccgctgtgggggacgttgtcaagtgggccaccgtgctccagcccttctggatggggattctggtgtcggtggtcatcggcgtggcccttactctgcccatctcgtcggccgccatctgcgccgccatcggcctgacggggctggccggcggggctgccgtggcgggctgctgcgccaatatggtgggctttgcggtactctccttccgggagaaccgctggggcgggctggtcagccagggcctgggcacctccatgctccagatgggcaacatcgtccgcaatccccgcatctggctgcctgcgatcctcacctcggccatcaccggccccctggccacctgcctgttccggctggagatgaacgacccggcttccgccgtggcctccggcatgggcacctgcggcatggtgggccccatcggggtgtacgccggatgggtcaacgatgtggccaccggggccaaggcggccatcacctccctggactgggttgggctggcgctcatctgctttgtcctccctgcggtgctctgctggctgttcggcctcttcttccggcgcatcgggtggatcaaggagggggatctgaccctggagtgacagggcccggcgtatcgccgcgcgggcagcacgcggcgcgcgcctgtaggggcggcccttgtggccgcctgcggacggggaggagccccgcccctgcgatttcccgctgaggccgtcgaaaaacgcgttcggcaggctgcggcgcggctcttgccgcgccgcttttttgctgtgcaaaggcggagcaaaattggccgtgtgccccctgccgcgtcccaggcgcatgaagttttacgcggaattgacagatccggcccgcctgtgttgttatagaggtgaaagggggcgaggccatggacgggacgcgggcggaggagctggtggagcggtacgccgacgccatcctccgcatcggctacacctggctgggggacatggacgacgccaaggacatctgccagacggtgctcatcaagctggtagaggagggccgtcgcttccccgatttgggccaggagcgggcgtgggtggtgcggctgagcgtcaacgcctgcaagaactggaaaaagagcgcctggttccgccgccgggcgccgctggaggagggcctgcacctggcggcggaggtgccggagccggaggacggcgcgctgctggccctggaggcccggcggccggctcccagacggcaaatacccctgcggcgtgtggcggccctggcggcctgcgcggggctggtgctgggactggtaaattatcaggccgtagccgccgggacagagcgggtgatccgttacttcctgggggtgggggcggcggaggagaacctctccctgctggtgcagggggaggcactccacaaggaggacggggcgttcctctaccgcatcggcggggcctatcagcgggatgggatgctcactgtgccggtgagtgtttttaccagagagggggcgctggccgagggggaggagctgcgctaccgcctgctggtatacgacgccgacgggaagaagctgcggcgggtgtcctcttactatgacgacgccaagggtgagatgtcggcccccgtttttttaacagaggggacgacataccaccccagccgcctggatgtccttgccgactggatgagccgcacctattgggcccagggctacacggagggcgaaaccgagatctatcacatggaggtgcccgacggggcgaaggggccctataccttcgacgtggaggtgtactccaacgacgtctcccatctgggctaccagcccatgtgggaggggggcgtcctggccctggataccccccagactctggacgccgtctccgtcagccgcaccttccgggagggtaccgtcaccgccctggtgggggacgacgggcacagcgtggctttctatggggagctgagccccgccctggcggcccgggaggagaagctgcaacagctatgggtgcccatgctctattctgaggatgaggcgggccgtgtccagcctgtgccggcgatatggttcatcgacgaggcgggcaaccgctatcggggctgttctatctggcacatgcccgccgcgtgggtcaccgatgaggcgggcaaccgctacgagcgataccgggtcttccccggcccggcggaggagtactggccggagttccggctgctggaggagccagaggagaagattacggctatcgaggtggaggcgctggttttcaacattctgcgcaccgaccggccgcgggaggtggagacccggtcgtatacatccacttataacccgctgaactgggtgatcgagttgccctagatcacacacccgcccggcggggctccggccccaccgggcggagcagcctttcacatgcgctttccctccgaaacgcttggcaaaagcgtttaccggcagactcacccgccaggggggttctcctcttttccgccatagacaaaatcctatgggcggcgtataatatccccatactacatagattggggaacggtcatggacacgaatgccaacaataaccgtgaatccttcgaggatcagcaggtcatttttgtggatacccatctgattcagaaggcggtggagggactccagcgcgcccgcgaggagttccagaccctgctggagcaggcggagggcggagacgcctccgtctattacgaccttggcgtgcgctataccgagggcgacgggaccgacaaggacccggcccaggcggcccgctggtttgccctggcctcggaggacggggatctccgggccaccgacctgctggggcgctgttaccagtctggcgcaggggtggagaaggacgaggcccgtgcggcggagctctttcagcaggcggcggagcaggactatgcccccgcccagtgcgacctgggcctgagctatgagaacggctccggcgtggagaaggacgaggcccgggcggcggagtgctacctccaggcggcggagcaggattacgccccggcccagaccaatctggcggtgtgctacttcaacggaatcggcgtggacaaggatgtggagtgcgcccaccagtggctggagaaggcggcggagcagaagtttccccgggcgctgaacattctgggcgactgccactgggacggcactggcgtggagcaggaccggggggaggcggcccggctctaccggcaggccgccgagcaggactatccccccgccctgtgcaacctgggcctgtgctatgagcacggggacggcgtggagcaggacaaggccaaggcggtggagtgctaccggaaggcggcggagcaggactacgccccggcccagtgtaatctgggcgtgctcacgctccacggcgtgggcaccgaggccgacccggccgcggcggcggagtggttccgccgggcagcggagcagagcttcgcacgtgcccaggatttgctgggcgactgctatctggacggcaagggcgtggaggccgacccggcccgggcggcggagctctaccggcaggccgccgaccagggctacgccccagcgctgtgcgacctgggcctgtgctacgagaacgccaacggcgtggcggaggacaaggtccaggcggcggagtgctatcggaaggcggcggagcaggactacgctcccgccatgtgcaacctggcggtgtgctatctcaacggcatcggcgtggaggaggacatggcccaggcggtggcgtggttccagaaggcggtggagggcggctccgcccgggccaagagcatcctgggggacttctacctggatggccgtggggtggagcaggacaaggagaaggccctctccctctaccgggagtctgcggcggacggctacctgcccgccatatgcagtctgggcctgtgctatgagaccggcgacggcgtggcggaggacaaggcccaggcggtggagtggtacaccagggccgccgaggggggctatgccccggcccagaccaatctggcttactgctttctcaccggcatcggcatggaggcggcgccggagaaggccatcccctggctggagaaggcggcggagcagggccaggcccgggcccagagcctgctgggaagctgctaccgggacggcgacggcgtggaggccgacgcggcccaggcggcggagtggtatggaaaggccgccaaacagaactatcccccggccatgtgcagcctggggctggccttcgagctgggggaggggctgaccgaagacccggccaaggcggtgtactggtacaccaaggccgccggggagggctatgccccggccatgaccaatctggccgtgtgcctgctcaacgggaccggcgcggaacggagcgcggaggaggccgtaggctggctggaaaaggcggcggagcaggagttcccgcgggcccaggggattctgggggatctgctgctcaccggcaacggcgcgcccgaggacaaggcccgggccgtggagctctaccgggccgccgccaagggcggctatgtgcccgccatgtgcgacctggggctgtgctatgagaacggggatggcgtagaggaggatctgcgccatgcggtgctgtggtaccgcaagagcgccgaggagggctatgccccgggccaatgcaacctggcggtgtgctacctcaacggaaacggagtggagcgggacgcggccgccgccgtgcggtggctggagaaggcggcggcccaggggaatgcccgggcacagagcatcctgggcgacctgtgccgggacggggagggcaccgaaatggatgcggcgcgggccttccagctctatacccaggcggcggagcagggctatccccccgcccagtgcgccttgggctactgctacgaggtggggagcggcacggcggaggacaagaccaaggcggtggagtggtacgaaaaggccgcgcagcggggccatgccaccgctcaatgtaatctggcctactgctacgagcagggcatcggcgtggcggaggacaagaccaaggccgtggagtggtatgccagggccgccgagcaggagcaccccagggccatgtgcaacctgggcctgtgctatgagtacggcgagggtgtggcggaggacaagactaaggcggcggagtggtatgagaaggccgcccggcgggggtatgccccggcccagtgcaacctgggcttcttctatgaccggggcgtgggcgtagcggaggacgccgccaaggccgtggagtggtacgagcgggcggcggagcagggctatccccgcgcccagtgcaacctgggctactgctatgagagcggcaagggcgtgaaggaggacaaggcccgggccgtgaagctgtaccgccaggccgccgaacagggcagctccgtgggccagtgtaacctgggctactgcatgctcaaggggatcggcatacggcctgacccggcgcaggcggtgtattggttccgaaaggccgccgaaggcggctccggccgggccatgtgcctgctgggtgactgttaccgggagggccagggcgtggaggccgacgcggcacaggcccggacgtgctaccaaaaggccattgacctgggcttcgacgccaaggaggagctggaggagctggacaaggccgcccccgccggagcggcggaacagccgaagaaaaagaagtccttcctgggccggctgtttggaaaataggacaaaatcaatcgcgggccgcaggcattgcctgcggcccgcgattgtatgatccccggccgggcggggcggccgcctccctcagccgatgcgtccgaagtcggagaaggggaagcagatgaactccgccttgcccagcagatagcgcgtgtccacggtgcccagggtcacgtcccggctgtcgttggagtggttgcggttatcccccatgacaaagaccgacccctccggcaccgtcacggaggtgagatcctcataccagggctcctccatgggctcgttcagatagggctcgtccagggcttcgccgtccacatagacggcgccggtctggtagtcgatgtccaccgtctggccctccacggcgatgatccgcttgacgatgggccccctggcggcgtcaaactccttggtgagcaccacgatgtcccccggctggggatcggtgtagccgatgtcccggatcagcatcacatccccctcgtggagggtgggcagcatggactcccccaccaccggggtgatgcgccccacgaaggtgaacaccaggatgatggtcaccagcgccacaatcaaaatctgaagccactcataggcctcctgagcgccgctgaggggcttttcttcttttttcggttttttcatgggcaaactccccgctttcgacaaaggaggggctgtccagcagcccctcccgtgcgtatcttatttcgcgtactcgatgaccttggtctcccggatcatgttgaccttgatctggccgggatactccagctcctcctcgatcttcttggcgatgtcccgggccaggagcaccatctgatcctcgctgaccttgtccggggccaccataatgcgcacctcgcggccggcctgaatggcgaaggacttctccacaccggggaaggaggaggtgacctcctccagcttctccagacgcttgatatagttctccaggttctcgcggcgggcgccggggcgggcggcggagatggcgtcggctgcctggacgatgcaggccacgatggtgcggggctccacgtcgttgtggtgcgcctcaatggcatgcacgatgtcctcgttctcccggtacttccgggccagctccacgccgatctgcacgtgggagccctccacctcgtggtcgatggacttgcccaggtcgtggagcaggccggcccgcttggcctgggtcacgtcggcgccgatctcggcggcgatcagccccgccaggtgggacacctcgatggagtggttgagcacgttctggccgtagctggtgcggtagcgcatgcggcccagcagcttgatgagctcggggtgcaggccgtggacattggtctcgaacacggcgcgctcgccctcggccttaatggtggcgtccacctcccgcttggccttctccaccatctcctcgatgcgggtgggatggatgcggccgtcctggatgagcttctccagggcgatgcgggcgatttcccggcgcaccgggtcgaagcaggagacggtgatggcctccggcgtgtcgtcgatgatcagatccacgccggtcatggtctccagcgtgcggatgttgcggccctcgcggccgatgatgcggcccttcatctcgtcattgggcaggggaaccacagagacggtggcttcggccacatggtcggcggcgcagcgctgaatggccagggacaggatctccttggcgcgggtgtcggcctcctccttgaactgggcctcgatctcccgcaccttcatggccgactcatgggtgacctcctcggcaagctggttgatgaggtagttcttggcctcctcggcggtgaagccggagatgcgctccagcacctccatctgggtcttcttgacggtggccacctcgtcccgggcctcgtccagctcggccagcttgcgctgcagggtgtcctccttcttctcgatgttctcggtcttgcggtccaggttctcctccttctgctggagccgccgctcctgcttctgcaggtcggcccggcgctccttcacctcgcgctcatactcgttgcgggcctggagaatctcctccttggcctccaccagcgcctcccgcttcttactctcggcgctcttgatggactcgttgatgatgcgcttggcctcctcctccgcactgttgatctctttttccgcggtgcgtttgcggatttgaatgccgatgggaatgcctatgatgagtgcgaccacggccgtgatcacacaggcgatgacagtctgcatcaagggttcaacacacctccatatcttggattttcaaagttctttttcatgaaacggatgcacgcgctcccgcccgctcttgggcagagcgcacaaaatttgaagagcttacccctcgttcttcaaaatattacaccttatctattttaagtctgcggcggccttctgtcaagaacattcctgttcggaatcaatttctgcggccctgggcctcaaggggatcggggcagggagtcgtcctcccgcacccagtcggccacctccaccacccggtactccgtgcgggtgtcccggatgaccacccgggcgatgccggcgttgatgatgaggcggcggcacatggagcaggaggtggagccgggaatcagcgccccggtgtccggctccacgcaggccatgtagagggtggcgcccagggcctcgctgcgggcggcggagatgatggcgttggcctcggcgtggacggagcggcacagctcgtaccgctccccggatgggatgttcagcgcctcgcgggtgcagtagttcagatccacgcagttgcgccgcccgcggggggcgccgttgtagccagtggagatgatctcgtcgctcttgacgagaatggccccatagcaccggcgcaggcaggtggagcgcccggccaccgtctgggcgatgtccagatagtaattctccttgtcgatgcgtcccataaacgcccctcccatgcttttttaccagtataccgggttttccgccgtcccgcaagccccggaatggctgtcccgggcggacaattcacatattgtttacgtttccttccttgacgaagaaacagggaggcgctatcataagttcagaaaaaatttatttttaacttcaaaggagacgaccgtatttcatggtgatgaacttcattcgaaaattgatgtacggccggtatggaagcgaccagctctcctttttcctcctcgtggtctatatcgtcctcattcttctgtccggcctgccccacctggaggtgctctcctggctggcgctggcagtgctcctgtgggatctgttccgcatgttctcccgccgtatcgaccgccgccgggcggagaacgcccggtttctggctctggccggacccgccatacgctggctgcggatgcgccgtaccatccgccgggacaaggagcaccgctacttcaagtgccccaactgcggacagtatctgcgggtgccccgggggaaggggaagatcaccgtcaactgccgcaactgcggcgccagctttgaggagcggagctgagctttcaccggccgggaccggcgcgccttgccgcgccggtcccgctttgcctttacaggcgggcgaaaagctggtatcatagcaaagaaagtgggtgaagccattgagacagtgtatggatgcggacaacctccaccgcagactgaaaaagatcatcgggcagttgggcgccatcgacaagatggtggatcaggacgtgccctgtgaggacatgctgatgcagatcaacgccgccaagagcgcactgcacaaggtgggacaggtggtgctggaggggcatctcaaccactgcgtccgggacggcatcgagcacggagacgcggaccggaccattgcggaattcgccaaagccatcgagcacttctcacgtatgagctgacgctgatgcggcccgtttgggccgcttttttcttgacaagtaatacccgtgggggtataaatatacctatagggggtatgggtatatgaaacgggatatcacattccttgcgctgggagggggttccctcctgttgagcttttttgccccggcggccctgccggtgaacccggcgtggctggccatcctgctctgcggcgcgcccattgtcagggaggcggccgtggggctgttcacccgctttgacatcaaggccgacgtgctggtgtccctggcgctgctcgcctcggtggccattggggagatctttgccgccggtgagatcgccttcatcatgcagcttggctctctgctggaggagcggacggtggccaaggcccgggcgggcatcgaaaagctggtccgactgacgccccgcaccgcccggcgggtgaccgccgccggggaggagagcatccccgccgaggtcgtggcggtgggggaccggctgcgggtgctccccggagagaccattccggtggacggggtggtgcgggccggacagacctccgtcaaccaggcggtgatgaccggcgagtccctcccggtggacaaggggccgggagacgaggtattcagcggcactgtcaaccagttcggctcctttgagatggaggccgcccgggtgggggaggacagctccatccagcggatgatccgcctggtgcagtcggcggatgcgggcaaggcgaagatcgtgggcctggccgaccgctgggccacctggatcgtggtcgccgccctcgcttccgcagccctcacgtggctgttcagcggtcaggtgatccgggcggtgaccatcctggtggtgttctgcccctgcgccctggtgctggccacccccaccgccatcatggcggccatcggcaacgccacccgccacagcttcctggtgcgggagggggacgccctggagcggctggcccaggtgggcaaggcggccttcgacaagacgggcaccctgacccgcggcgtgcccgaggtgacggcggtgcgcagcctgtcccccggcgtgacggaggaacaggtctacgcctggctggcccgggcggagctgggctcggagcatcccctgggcaaagcggtggtcagggggtggcaggccgccggaggcgggacgcccgccccggcggaggccttcgaggccctgcccggccggggactccgggcggtgctggacggccataccgtcctggcaggcagcgaggccctgctggaggaggcgggcgcggcccttcccccggcggccagagcggaggcggagggttttctggcccaggggtgcaccctcatctatctggcggtggacggggcccccgccggcttctgcgccctggcggacacggtgcggggagaggcggcggccatgctccgggccctgagcgcggagggggtgtccccggtgctcctcaccggcgacaacgagaacgccgccgcccacatcgcccgggcgctgtccattcgggagtaccgggcggggtgtctgccggaggacaagctcaactggatcgaccgggcccagcaggcgggcgtccggatctgcatggtgggcgacggcatcaacgacgcccccgccctgaaaagggcctttgtgggcatcgccatggggggcgtgggcagtgatatcgccgtggacgccgccgacatcgttctggtgaacgaccgggtggaggagctgccccacctgctggccctgtcccggcggatgatgaccaccatccgcctcaacctggccttctctatggccctcaacctagtggccatcgtgctggccatgaccggcatcctcaaccccgtggtgggggccctggttcacaacgccggctccgtgctggtgatcctcaactccgccctgctgctgaaatggaggagaaagagctgacgccgcggggagcatggagcatatggaaaaacagagccgccgccccgactggggcggcggctctgtgctgctatccgacggtaccctgtatggcgctctcggccagggccagatcatccttgtgcacatataccgtgtactcgaagggggctgcgccggcccccagatggagggccgggccggaggttccatagccggagaagccgcccaccgggcggctgtcctgggtgatgacaaactccaccccggcatcctggagggcggcgcggagctgtccgacctcctgggcgttgaaggtgttgcagagcctgcggcgggcgaggaggggaatcgtggacatgacggcacgctcctttcgataaaaagagacctcttccgacggccgcccacgggcatttttcagttgagggtgccctgaagggcggcctgggccagctcaaagtcgtcctcatggacataaataatgtattcaacggagggggggaccaactgcaggccgatgccgaaaaaggaaccgttctggcggtcctgccgaatgatgaattccaccccggcgtcctggagggcggcgcggagctgcccgacctcctgggcgttgaaggtgctgcagagcctgcggcgggcaaagaaggggatgctggacatgacggcacgctcctttccacagaaaaggccttgtttccaaccgccgcccgcagggcggccccccaaccgcgagcccaacaacgtgggtcgcggttggaggcgaagaaccgcccggcccggctaagaggtttcgccatcccggcggaacctcgtgccaaaagggcggttctgagcccgtggcgggggcgggtgcgaatcgaacacaccaggacgggagcgccgtccccgtcggttttgaagaccggggggcccaccagcggcccttccgcccccatatccactcccatcatagctggttttccaccgtgggtcaagcagatgtggaaaaaatccggccctctccctgccggcgggtgacgccggaggcgtcccagtgctccagcaggagcagggcgcaccggcgggaacagcccagggcgtccctggcctgggccagggagaaggaggcggagcggaagcgcccgcgcagccgggcctccgccacccggacggccccggcgtggagcagatggccgggggagagcctgcccgcctgggcggcggccctggagcccgcggaggcgctggaagcccacctccgcgcctggcgggtgcccatcctgggccgcatccaccgggggaagctcctgctggacgtgcgcaccctcctgcccggcgatgaggcggagatcgccgccgccctggcggcgtggagggaggagagggcatgaccttctgcaccgcgggccatgtggaccacggcaagaccgccctggtgcgggccctcaccggggtggacaccgaccggctggccgaggagcgccgccggggcctcaccatcgagctggggttcgcccccctggagctgccgggggtggggcgggtctccctggtggacgtgcccggccacgcccagttcatccccaccatgctctccggctgcggcgggctggacggcgcgctcttcaccgtggccgccgacgagggccccatgccccagacggcggagcacctggacattctctccctgctgggcctggagcggggggtggtcgccctcacccgggcggatctggcctcccccgccgcccgggcggaggcggaggcgcgcacccgtgccctgacggcaggcacctttctggcgggagccccccggatcttcgtctccgccgtcaccggcgaggggctggaggcgctgcgggccgccctggcggccatggcccggcaggcaccgcccccgccggagggcagcccccggctccacgtggaccgggtcttctccgtggacggcagcggcacggtggtcaccggcaccctcaccggcggccccctccgccggggggacagggtgcagctctatccgggagggcagaccgcccgggtacggggccttcagtgccacggcgtcccggcggaggcgctgcccgccggggtgcgggcggcggtgaacctggcgggggtgcgcctgcgggacgtgggccggggggacaccctggctgcgcccggcgccctcgccctcaccgaccgggccgacgtgtccctgcgggtgctccccggcgcccccttccccgtgcgcaccggcagtcagctccacttccaccacggcgcccgcgccctggtgtgccgctgcatcctcctgggacaggacgtgctccgccccggcgaggcggggtgggcccagctccgcttcgcccagccggtcgccgcctcccccggcgaccggttcgtggcgcgcttcttctcccccctggccacggtgggaggcggcgtgctggtggatctggcgccgccccgcaagggccgcatggccccggagc

SEQ ID NO: 343 - DNA, 276688 bp, Flavonifractor plautii
  source 1..276688: mol_type = genomic DNA
cttctggctatcccccagctcccggtcatgatcgtcattggggcctttctggggcagagcacctggaacctggtctggatcatcgccgccttctcctgggccccggtggcccggcagatgcgggccaagaccatctccatccggcggcgggactacgtgcagatggcccggctctacggcggcggaacctggtacctcatccgcacccacatcggccatgagctgtggcctctgctcaccatcaatgccctggcggtggtgggacgggccattctccaggagtcctccctggcctttctgggcctgtccgacccgctggcccgctcctggggtatgatgatcgcccgggccgtggacttccccggtctctaccggacggacttctggacgtggtggctcctcccgccggtgggggcgctggtgctgtccacgctgctgctgcgcctgctggtgggcgggctggaggaacaacagaggagggagaagccgtgctgctggaagtgaacaatctgtcggtgtcctacccggagttcaccctccacccggtgagctttacactggacgccggggaaatgctcaccatcgtgggggagtcgggcagcggcaagaccaccctggcccgcgccatcgcctgcctgtccgagccggaggcccagatcagcgggcaggtgtacctcaacggcagggagctgctggccatggacgagcgggcgcgcagacccctgcgcatgaaggagttcgccctctccttccagaactcggccgagtggctcaacccctccctcaccctggcggagcacctgcgggaggtgctgtgccgggcgtaccggggggcggagatggcggcgcggatggaggagctgatggccctggtgggtctggagacggcggatctggagcgctatccccgggagctgtccggcggcatggtgcagaagttcctgctggccaacgccctggccctcaaccccgccctggtgctgctggacgagcccaccggcgccctggacatcgcctccagccgggggatcacggcgctgatccaggaattaaaccgcaggctgggcaccgccttcctggtcatcacccacgacatgaagctggccgccgatctgggggggcggacggtggtgctctacgacgggcacgtggaggaggcgggggacacccgcgcccttttggaccacccccgccacccctacacccggggcctgctccagtcggcggtgggcctcaacccggtgcgggacatgtggggcatccgccccactactgtctcctacacccggcagccccacggctgccccttctacggccgctgtacccagagcctgccggactgcgccgcccacgcgccggagctggagacccagcccgacggccgcctcctggcctgcaaccgggggggcgtgctcacgcttctggaatgccggggcctttgcaaagccttcgggcggcggcgggtgctgagcagcgtcgacctcaccctctacagcggggagatcgtctccctggtgggccgctccggcgcgggcaagaccaccctggcccgcaccctggcggggctgctccccctggagggcggcggctcggtggagttccagggggaaccggccgacttcgccgccctccaccgccgcctgggcggggtgcagatggtgctccaggacagccaggccgccctcaacccccgcatgacggtgcgggaggcggtggaggagcccatgcgcctgtccggctgctttcaggacggggcggcggagcgggcgctggaggacgtgggccttttcgcctgcgacagctttctcacccggcacatccacgccctgtccggcggccagcggcagcgggtggccattgcccgcgccctggccatggaacccgccctcctcctcgccgacgagcccacctccatgctggacccctcaggcaaggccaatctgctgcggatgctcaagggcctccagaacagccggggcttctccatgctgttcatcacccacgatctggacagcgccctgaagatttccgaccgtctcttccgtctggagaagggggcgctcacccggctgaaccccaacgactacattcaagtgcgctttgacggcctgtttgacgcgggctagcctacgccgcagaaaggacgaatgaatatggatcgacaagccctatgggacaaatgcgtggccttccacggccacgcgtgcggcggcctgaccatcggcttccaggccgcccggtacgctatggagctgctggagctggacttctccgccgacgaggacgtggtgtgcatcgcggagaacgacgcctgcggcgtagacgccattcaggtgctgctggggtgcagcgtaggcaagggcaacctgctcttccacctccggggcaagcaggccttctccttctataaccggaagaccggcaaggcggtgcgcctggtgctccgccccactccggcggagtaccagaccaaagaggagcggtttcgctacctccaggacgccgcccccgcgtccctcttcgacgtgaagcccgccgtgctgtccctgcccgagaaggcccggctcttccagtccctcccctgcgacggctgcggcgaggtgacggcggagcacctgctccggctggagaatgggaaaaagctgtgcctggactgcttccgggcctacaaccgctttgatgtataaggagtcaaacatgacgctgaacgagtttttcgcagcccatcccaagtgcgccctgggcttctccggcggggtggactcggcctatctgctgtacgccggggtgcaggccggggcggatatccgcccatactacatcaaaaccgctttccagccccggtttgagcgggacgacgccctccggctggccggggaactgggggtggaggtgacggtgctggagctggacgccctggccgacccgcgggtggcggccaacccggcggagcggtgctactactgcaagcagaacctgttccgcgcgctgaaggcgcgggccgcggccgacgggtacaccgtcctgctggacggcaccaacgcctccgacgaggccggcgaccggccgggcatgagggctctgcgggagctggaggtgcgctcccccctgcgggagtgcggcctgaccaaggcggacatacgccgcctgtccagggaggcgggcctctttacctgggataagccggcctatgcctgcctggccacccggattcccaccggggaagccattaccggggagatcctggcccgggtggagggggcggaggacgccctgttccgcctggggtacactgacttccgggtgcgggtgttccacggggcggcacggctccagcttccggccggacagctggagcgggccgtccgggagcgggccgtcctgcgggcggccctggccccctatttcaagccgattctgctggatttggaggagcgctgaatggaacagagagcgatcaaagccctgctggagcaggtggccgccggacaggtggatgtaaacgacgccctgctcaagctgaaaatggagccgttcgaggagctgggctttgccaagctggacagccaccgtggcctccgccagggggtggccgaggtgatctacggcgcgggcaagaccccggagcagatcgcccgcatcgtggacgccatgcgctccggcgggcaggacaccatcctcatcacccggatgtcggacgaggcggcggcggccattgacccggcccaccccttcacctattacgagatgggccgcatcggcatcgtgggcagccttccctcccccgacggcagcgggaaggtggtggtggccaccggcggtaccagtgacatgccggtggccgaggaggccgccctcaccgccgaggccctgggcaacgaggtggtgcgcctgtacgacgtgggagtggcggggctgcaccgtctgctctcccacctggaggagctcatgagcgccaacgtcatcatcgccatcgcggggatggagggcgctctggccagcgtcatcggcgggctggccgactgcccggtaatcgccgtccccaccagcatcggctacggggcctgcttccacggtctgtcctccctgttgtccatgctcaactcctgcgccagcggggtgagcgtggtcaacatcgacaacggcttcggcgcgggctatctggccagcatgatcaaccacatgggagggaaacagaaatgagaacactctatctggactgcggtatgggggccgccggcgatatgctcatggcggccctgctggagcttgtggacgacaaggcagcctttctggagaagatgaacggcctgggcctgcccggcgtggcggtgtccgccgtaccggccgtcaaatgcggcatcaccggcacccatgtggcggtgacggtacacggggaggaggaggtcagctgcgacgtatccccggaggggcacatccaccatcacgaccgcagccatgagcatggtcacgagcacagccacgagcacgaacatggccatgaacacgagcaccaccatcacgaccacgaccatggacatcaccaccacaccggaatgggggagatccgccatctgctgggccatctggagctgcccgaggcggtacgggccgatgcggaggcggtctacggcctgattgcggaggctgagagccacgcccacggcgcgccggtggaggagatccacttccacgaggtgggcagcctggacgcggtggccgacgtggcgggggtctgcctgctggtgcacatgctgggtgtggagcgtatcgtggcctccccggtacacgttggaagcggccaggtgcgctgcgcccacggcatcctgcccgtgcccgcccccgccacggcccacattctccgggacgtgcccatctacggcggagccatccgtggtgagttgtgcacccccaccggcgcggcactactcaagcactttgtcaccgaattcggcgccatgccggtgatgaaggtggaaaaaatcggctatggtatgggaaacaaggactttgaggcggccaactgtgtccgcgccctgctgggggagaccgcgggcggcggggacgaggtggccgagctgtgctgcaatctggacgacatgaccgccgaggccatcggctttgcccaggaggagttgcttgccgccggagcactggacgtgtataccacgcccatcggcatgaagaagggccgccccgccgtgctgttctcctgtatgtgccgcatggaggatcgggagaggctgcttggcctgcttttccggcacaccaccactctgggcgtgcgggagaatgtgtgccgccggtataccctggagcggggtgagcgcaccgtggataccccccacggccccgtgcggctcaagaccgcctccggctggggcgtcgtccgctccaagccggagtacgaggatgtggcccgtatcgcccgcggccagggcatcagcctggctgaggtgtttgattggctcaagtgacctgtactgtgttttaagtctaagtctaccaaatgtctaccaaaaagagcccggaaccgttgcggttccgggctctttttgtgcttggcatgcccggcgtgtctaccagaggtctaccaacgccactttttgccgctcttttgtgccatttagaactgcatgtggggggaatccctcctttttcatggcttgcaaggggcgtcatacgcccctctggctcaaaattcagaaggaggaaatccaaatgagaaacctcaagcgggctctcagcctggctctggcggcgatcatgctcatcggtatgatggttgtctccgcctccgctgtgagctacaacgatctcaccgataaggatcagatcgtgaacaaggacgccgtttccatgctggtttccctcggcatcatcgagggcaagcccgacggctcctatgcacccaccgaaaatgttgaccgcgctcagatggcgaagatgctctccgtcatcatgaacaagggcgtggacaacagcgctctgtaccagagcgtcaactccggcctgaccgatatcaccagcaactgggccaagggccatatcaactactgctacaccaccggcatcatcgccggccgcggcaacggcacctttgatcccagcgccaccgtgaccgccctggaggcggccaagatgctgctggtggccgtgggctacgatcccaagatcgagggctttgagggtgccgactgggccatcaacgtgtccgtccgcgccgacgagcagggcatcttcgaagggttcaccaaggatctgtccgctcccctgaaccgcgacgacgcggccctgctgatctacaacgccctggacgtggagatgatccagagctacactaccaacaactaccccatcgtttacagcgatcaccgcaccatcctgtccgacaagtacggcgtgatcaaggtggagggcgttgtcaccgccaatgagtgggccatcctggacgacgacaccgataccgcgctgcaggagggcaagacccgcatctacaaccccgacggcatcctgtccaccaccggcaacaccgccgtggcccaggattccagcgccaacgtgaagacccaggtcttcaatgtcagcactcctgttgatatgctgggtaaggccgtcaccatgtacgtgaagaagaccaccattctggccgactccaccgtgtatggcgctcctgtggtctccgacgtgaacaccgtcattgagaccggcgagaaggtcaccggcggcgactccaaggacgacgactccctggccgccctgctgaagggcactggcctggccacggataaggccaccgagtattaccacaactatgaggaaatggccattgacagcgctgatgtggacgatatcatgaacgtgaagggcgccgccctgaccgtcatcgacaacgacaacgacggctatgtcaactatgtcatctccgtggagaagtccctgacccatgtgtccggcgtcagctccaagaacgagaccaccaccctgtacggcctgcccggcgacgatgtcatcgacaacgaggatatcgtgaccactgccacggatctgaccaagggcgacgtggtgctggttgtccagtacggcggccgtacctatgtggaggagcccaagaccgttaccggtgagatggagctcttcaacgccaagaacaaggacgacaacaagaactacatcaaggtcggcggcgaggagtacaagcaggacggcctggaggttctgagcaacatcaacaaggataaccccgtcaagttcctgatctctgagtgtgacgataaggccaacggcgtgcagtttgacgctcagtacgacttcttcctggacgacttcggcaacatcgtggccttccgtgaggtcgagggcgctcccacccagtacgctctggctctggactccgcttactccatcaacggcctgaccaccaccggccagatcaagctgctgctggcggacggcacctccaaggtctatgacgtggacatggacgccaccgctgaccgctttgaggatctcgccaattccgacgacaacagcaccaaggacagcgcggttgagacctggtttggcagtgcgatcaccgacgacaactccatggacgccgtcctgaagttcatgggttccgatgacgctaccgctgccggtgccaagactaagggctatgcctccggcaacttggtggcctacaccattgacgacgatgaggtcgtgaccttcgggcctgctgagctggatgacggcgtgatcgtcaatggcaccagcaaaaactatatcaaaggcgacaactacacagaaagcgggaagtctactttcttccatagtagccagaccgagctgaaggctgatgttgccagaggcgatgtcgacctgcgtctggagaacagctctgttgatacccacaccaacagctatggtatcgacgaggaaaccattatttactactataatggatccaagggctatgtggccgtgggctatgacaacatggccaagatgatcgacgctgataaagcgggtggtatcgataacggcaaggtccgcgcctccgtggtggccttcgacgatgccaccgacgttgccgaggtcatcgtgctctacactgaccaggccaagttcggcaccgacgcctatgtctatgtcatgagcgtctacgacaagtccggcagcgtgtatacctactccgtcattgacgaagagggcaacgttctccagatgcaatccaagaccaagggaatggccggcaagctttgcacctacacggccgatggcgactactacgtactggaggctcaggccgattgtgtgtctaacagcaacaagaccgctgcggctgacgtggccaacgacgtgggcctgattgttaccacccgtaccaagtacttcaaggtctatgacttcgacaaggcaactgatctgatgtccgatgacgagactgtgaagcagtccttcgtgagtggcgtcaatgacaactccaacaccgactgggagcgctatgccgacaaggccctggttatcgacgtggagaacaccgaggtggacgacaagactgccgctaccactgagttgacctccggtcagtacggtatcgtggtgtacaacgatgacggccaggccgaggtcgtgtatgtcaccgacacctacaagatggaggttgacgtcgacgctggcgatgacgacaacgccaataacgaccgcatcacctccaccactgtggacggcgttaagactgccagcgctggcgactataccaccatcgccaaggccgttgcgaatgccaccactctgcctctgtctgctgagcaggccaagaacgctactgtgaccatcaccgtcgacgactctgttaccgcgcacgcttccggtatcttcaccactgcggcggtcgctgaaaatggcacggatagtgatctgactaaccgcactgacgatatcgccagtagcaagaatctgaataacggcaacgttattgtggtaaagacttgggacggcacctttgcccgttactccgcctacattgttgaggttcagtaatctggcattgctgtcaaactcaagttcaaacaagaatcccccggacaagtccgggggattcttgttattattggaacgccaaatacagatattctctccctacctcgttcagattggcattccgatcatcctggacgcggaacccgctgtcagtcatgaccatataagcggtgtccccgtcgatggagagccgcggctggttgtaggactgatatcccagcgagaccagcaccgccgcgggccggaagcccagctccaccgtcaaatagcttccgtttccggtataggcgcctttgaccgtgtggctgcacgcggcaatggccccgtcaattttggcgaagtccgcgttgaaatccgtccgcaggaagctgtcctccgattcccactggtggagctgataatgttaggtataatttgccatgaatattcccccttccgggatatgagagtccccaacgcccggcgtaccgccggacgcgggggactccttctgccggacgccctgcgggcgggtgtgggcacccgcccctacgtccaagcgccgcaagatagcccgccgggaacggaaccccggaagtaggggcggcttttatggccgcccgcaggcggggacaagccccgcccctacggagcattttgccgggcggtgcctgccgcagcagacctctgtaggggccgatgcccacatcggcccgcccctccgggccaccggccagctccgggcgggtgtgggcacccgcccctacacacaagcgccacaaggtagtccgccgggaacggaaccccggaagtaggggcggcccttgtggccgcccacgggcggggacaagccccgcccctacggggcgaagcgttcccagcgggggcaaaaagggggcggccgcaagtgccgcccgtgcacagggtgtaaaatgcattttggggcgacaccgcctctgttcaggttcccgctactccgggaggctggaaatccgtgctgctcccgacgtgaaaaaaccggttccccggcgcggacgccggggaaccggtttactctattcactcactttttcaggctctcggcccagactgcgtacttggcaaccttggcgtcgcaggcctccctggaggcgtcgttggccaggatgtagaccttgaccttgggctcggtgccggagggccggacgatgaggctggtgccgtcggccatctcatagcgcagcacgttggagccggacagctccatggtgctcttcgcgccgtcggccacgttgaccacgctgccgtccttgtagtccttctgctggagcacgcccacgccggcgatctccaccgggggcttttcccgaaggttggccatcagatcggccatcttcttcaggccgtccaggccgggcatcaccaggttcagggtcttttcgccgtaatagccgtacttctcatagcaggccagcagggcgtcgtacagggtcatgccctgtccggcgtaccaggccgccatctcggtgagggacagggcggcggtgacggcgtccttgtcgcggacatagtcgcccagcatgtagccgtagctctcctcgtaggcgaagatcaccttgccctccccggcgttctccagcttgtccttcttctccgccaggaacttgaagccggtaaaggtgtcgtagcacttcaggccgttggtctcggccaccttgcgggccatctcggtggtaacgatggtcttgagggccacggggttggcgggcatcttgccggtgcgctgctttgccccgatcaggtagtccagcagcagcacgccggtctggttgccggtgagcaccttgaactccccgtcggaggtgcgcaccatgatgcccacccggtcggcgtcggggtcggagccgaggataaagtccgccccctccttcttggccagatccacagccagatagaagccctccgggttctccgggttgggggagaccacggtggggaaattgccgtcgatgaccatctgctcggggacacagatgacgtgcttcatgcccaggcggcgcagggcctcggggatgagcttgtagccggtgccgtggaagggggtgtaaaccatcttgaaggtgtcggccaccttctccaccgcggccttgtcgttgacctgacccatgacgttggagaggaacttctcgtcggtctcagcccccatgacggtgatcaggcccttctccaccgcctcgtcgtagtccatgcgcttgatggaggcgaagaagtccagctcctccatcttcttggcgatggcctcggcgtggtggggggggagctgggcgccgtcctgccagtagaccttgtagccgttgtactccttggggttgtggctggcagtgacgttcacgccggcgatacagccatactcccggacggcgaaggacagctcgggggtggggcggagggactcgaagatacgtacggggatgccgttgcccgccatgacgccggcggtctcacgggcgaactcctgggagtggttgcggcagtcgaagcacaccgccacgccgcgcttcaccgcctcggggccctcggccagaatgacctcggcgaaggcctgggtggcgtggcggatgacgtggatgttcatctggtgcaggccgacgcacatggtgccgcgcaggccggcggtgccgaactccagtggggcaaagaaccggctctcaatctccttctcgtcgccggaaatagagcgcagctcctccttttccgcctcactgagcgcagagctgctgagccacttttcataaacatcacgataggacatgggactaacctccaatatctgaaattctggcgtaaacgatgtactgcactgtgattatagcacaaaaattcaccaatatccagcctgtcttttgacgaattcgggagattgtcacgcctacttgtggtagctggagccttcgtcgatcttgaagctgcggtagagctgctccagcagcatcacccgggccagatggtggggaaaggtcatgggggacatggacagcttggcccacgcctgggccttgagggagggggcaaggccgtaggagccgccgatcagaaaggccaggctgcttcccccccggctgctccagtcggacaggaggccggagagctcctcgctggagcgcatgcacccctcaacgcacagggcgatcaggctggcccccggcgccagcctggcgcggatggccgccgcctccttctccagggcggcgtcgatctgggcctgggatggattggacggcagccgctcctccggcagctccaccacctggagcttacagtaggccgacaggcgcttgacgtactccgccgccgcgtcgatgtaaaatttctccttcatcttgcccacgcagatgagctgcacccggatgcccttcataccgtgtacctccggctcttctcgctgcggggggccacctccagcgccacgtcccggcccactgccgcgccccggcgctccagtacgccccgtaccacctcgtgggcccgggcgggggtgttgttctcatgggacaggtgggccagcaccaccgtgcgggcgcccccctccaccgccgtccaggccagctcggcccccgcctcgttggacaggtggccccggtcgcccagaatgcgggccttgaggtggtaagggtaggggccggactgcacccactccacgtcgtggttggcctcggccaccaggagatccgccccccggatgccgcgaagcaccgccccggtcacatagcccaggtcggtgaccaccgccgccttccgccccccggcggacagggcgtagcccacgctctccgccgcgtcgtgggaggtggggaagctctcaatcgccagcccgccgacggaaaagccctcccccggcgccacagggcggagcagctcctccagaaaggcgatgcggtagcaaagctgccgccccgtcccagggctggcatacaccggcagcctgagctgcttggtcagggtggtcaaaccggagatgtggtcgctgtgctcgtgggtgatcagcacgccggcgagctccgttggctccacgcccagctccttcaggccggtgcagatacggcggcaggagatgcccgcgtccaccagcacgtgggtgcggccgtcggtcaccagcaggctgttgccgctggagccgctggccagggtacaaagttccagcacggaatcgctcctcactatgtagtctctctgcgcaaaaaagggcggcggcctgcgccgccgctccctgttttctttttagcctacctggctctgcttctcctcgtccggggtgaccaccacgcggatgtccgcccccacgccggagagcttgcgcacgatatcctcgtagccccgctcgatgtggtggatgcagccaatttcggtggtgccctgggccgccaggcccgcgattaccatggccgccccggcccgcagatcgcaggcctggatacgggcgccggtgagcttctccacgccctcgatgacggcgatcttgccgtccacctggatctgggcgcccatccgccggaactcgtccacatagcggtagcggttgtcccacacgccctcggtgagcacgctggtgccctccgccaggcagaggacggcggcaatctggggctgcatgtcggtggggaagccggggtagggcagggtcttgacgttggtgcgggtcagcttgccgtgccggcgcaccagcaccgcgtcatcccgctcctccacgtccacccccatctccagcagcttggcggtgatgcactccagatgcttggggatgacgttgcggatgagcacctcgcccccggcggcggccacggcggtcatataagtgcccgcctcaatctggtcagggataatggagtagctgccgccggacaggcgctccaccccgcggatcttgatcacgtcggtgcccgcgcccatgatctccgcgcccatggagttgaggaagttggccagatccacgatgtggggctccttggcggcgttctcaatgacagtcaggccgtcggccagcacggccgccagcatgatgttcatggtggcgcccaccgagacgatgtccagatagatctgggtgccgcacatgcggccgtttttggccttggcatggatgtagccgccccgcacatccacgtcggcccccatggccacaaagcccttgatgtgctggtcaatgggccgtccgccgaagtcacagccacccggagggggcacctcggcggagccgaaccggcccagcagcgccccaatgaggtaataagaggcgcggattttccgcgccagctcctcaggcacacgggcgttgcggatgtgggagcagtccacgtccaccgtggtgcggttgacggtgcgcacatcggcgcccagctcctgcaaaatattcagaatcaatgtcacgtcgctgatctggggaatgttctcaatgcggcataccccgtccaccagcagggcggcggggattatggcgacggcggcattcttcgcgccgctgatgtcaatttctccaaaaagcggctttccgccgtggatcacatattttgtcaaagctacaaccctctattccttccgccgcagccgtttccggcataaacggtatccaagggccggcaattcaccggcccggtaaacacaatttaataaacgccttccatggaagtgcgctccaatacgagtacattatagcagatctctccttaaaatcaaagcaaaattctcgtgtgctccgattttctcttctcgtgcctgtgatcctttgctttcaaaatacccaatctgccgacttttatacctcttctgatcgtgcgtggggttatgtctaccaaatgtctaccaaaatgcaacgcaaagcgcctgaattttcagctttttccccaaggagttttttataatgtctaccatacgtctaccatgcgaaccttttgattctgtttccccgccttttatacccctattccccgaaagctgcattctttcctcccatgtaaggggcgtcatacgcccctaggcttcaaaattcagaaggaggaaatccaaatgagaaacctcaagcggactctcagcctggttctggccgctgtcatgctcgtcggtatgatggtcgtcggcgcctccgctgcgagcagtgatttcgtcgacggcaacgagatcacttacgccgaggccgcggaagtcatgaccgcgctcggcgtgttcgagggcaccgacaagggcgcctttgatcctaccggcattctgacccgtgagcaggctgcggccatcatctgccgcatgctcttgggcgacgatgccgagaacctgaccactaactccactgtgttcagcgacgtggctgccgaccgctggtctgccggctacatcggctactgcgcccagcagaacattctggcgggcacaggcaacggcaccttcaatcctgagggtgagctgaccggactggcatttgccaagatgctgctggtggccctgggctatgatcccgctatcgagcagtatgtgggcaacgactgggccgtcaatgtggccgccgatgccgtggatgccggtattgccgtgtccggtgtaatcatggccgatgccatgacccgtgagcaggctgcccagatggcctaccagaccctggaggccgacatggtgcgctacgccagccgcggcaccactatccagcagcctgacggctccaccatcatcgtgggcaacactgccgctgaacctgtctccaagaccgacagcgactatgccggcgacagcaacgacgatacccagcagttctgtgagcgttacttcgcagatctgaaaaaggtcaacggtgaggacgactttgcccgccccgccagccagtggaagctgaagaacgacatcatcggcacttatcctgctgaggctgacggaacctttactaccgctgtggataagggcgacctgtatgatgtgctcggccgcaccgtctacaacgatatcaccgcctctaagcccactgatttttctgtttacgtggatggcgatccggtcagcagccctgacgtggccgactactttgtgaacaacgaaaccgacgacgccaaaggcactgccaagggcgttctgacccaggtgtttgtggacgacgacaacaacgtcatcctgtctcagattcacacctatgtggctcaggtggacggcggctacgacgaggagaacgaggagctggagctggatgatctgggcctggataccttccccgctgtcaataccaccctgtctgccgacgactttgaaaacctgtccgcatttgaggacggcgattatgtcctgatcaccgctgtgggcgacgaggtcaagaccattcaggctgccgaagtagtctccggcactgtgacctcctacacctccaataagaacgtcacgcttgacggcaccaagtacgagtacagccagggctacagcagcacctacaatctgaaggatgactacgatctggtcctggatacttacggctatgtcatctacgctgacggcgtggaggcttccaacgactacgtgttcatcaccaatgtcgctcagatcggcggcgttaacaagagctttgaggctaaggcctacttcgtggacggcaccaccgctgtcatcgaggtttctaacgccgatgaccttgagtgggagagcaccgacaagaccaagaacacctggttctcctatgacgagaagaacgacggcacctatgagctgggcaagctgaacagcaatgattccgctagcaaggactttaatactaccggcaagatcattgaaaccggcgatgcccgtatttctctggacaagagcgtccgcctgaataacgacaccgtgttcgtgatccgccgcggcgacaacgtgaatgtctacactggcatccgcaacgtgcccgacgtgaacatcacccacctggagtccgatgccgaggttgaggtcgttgcgatcttggacgacaacggctatgccgactacctgttcatcaacggtgagactggcgagctgggcgtgtccggcagcgtggcgggtgaccgcatctacatcctggacaccgattacgagtccagccaggatgccgacgataacaagtactatgtctttgacgctattgtcaacggcgagatcggcactgtcaacctgaacagcaccagtgatgtggaggttggcctgtacggtaatgtgacctacgacgctgacggctatgtcaacaccagcgatctgaaccgcatcaacaacgccgtctccggcaacgacctgcgcgtctggaacgtcgactccacgatcgcctactcctccggcgtgctgtccttcgacggtgtggatttggttctggccgacgagtacaccatcttcctaaacgatggcggcaccggcaagaccaccactcccagccgtctggcccgcgactatgaggacgacaacttcaagggtgtgatctccgctgtttacgatggcgacgctgtgattgaggtctatgtggacgaggacaacagcgttatcaccgacgagaccgtggctgaggttgaggaggccgtctctgatgccgtggtgaatgcggatggcgcttggggacagaacggcgacctgggtaactatgttgcccacggcacctggaactccgacggcaccaaggtgactgcctcctttgagcagtccgccattagtaccgagtccaatgccattacttgggatactgcccgcttcctgggctccctgcacaagaacggtgctaccaccatcgtgtatgacggtgtgacctatgtgtgggataaggacggcggcctccagggcagcaactggtatgattccagcgacaaaggtctgaccactggcgacaacgctaacactctggtcaaggctctggccgatgccggcgtctttgacggtgacgagactgcgactgctactctgactgtggacggcgtggacatcactatcacttttagcgtgtccgagtaatccaatcagaatttaccctgtgggcggaaaacccccgtgcgctaaagcacgggggtttttctttttctcagcgcaaagccaggtagtgatagcggtcacggtcggagttggagaaaacctcctcgtcataatcgtagaatacctggaatccccctgtaacgacgcggagaaccggctcgccggaggtggattcccagtccgtgtttacctctgccccctccagggccagaccgccataacgcgagctggtgtaattgatcggcccggaaccggaggccagcagtaccgccttaggggaaaaacccagctcaatggtgcggctggcctccccgtctccggtatagctccccgttaccagctcggatttcccggcaacctgctcggcaagcgtatccaccgcagactgttctgccttcccgcccagcgcaccgtcaattttggcgaagtcctcgttgaagtcggtgcggagaaagctgtcctccggttcccattgatgtaattgataatgcgccgtataatttgccattcttattaccccctctggagataggggcacccccgcgcccggcataccgccggacgcggggatcttgtctgctggacggcttgtaggggcgggcttgtccctgccgcgggcggccacaagggccgcccctacgggtggagacgtacggggacaggcgggggtaagtcctgctttgtaggggccgatgcccacatcggcacgtctttccgggccaccggccagccccgggcgggtgtgggtacccgcccctacatacaagcgccgtgagatagcctgccggaaacggaaccccggaaatgtaggggcggcctttatggccgcccgcgggcggggacaagccccacccctacagaatatccggccgggcggaaaacaggagttcccatttggcggaaaatgcgctataatggaacacggagaaaacgccgatgggggcggttaaatgtatcagaccaggataacggcggcggagctcccggtggagcaactgctgggggaatactgtttcccggagcggttccgggaggcctgccgggcctgcccggactacggaaacgattggtcctgcccgccgggggtaccgtcggcggcggaggccctgcggccttttcggacagcccatgtgctgggcatgcaggtattttatgatgcacagacgcgccgggaggtgtccacggcggagggggctgaggcggtgcgccgggcgtcctatggaccagccaagcgggtactgctggaaacccttctggcgctggagcagacccggagcggggcgtggaccatcgcggcgggacggtgtgagctgtgcccccgctgcgcccggcgggacgggctgccctgccggaatccggggcggatgcgctactccttttccgcgttcggctttgatctggcggcgctggcccggcgggagctgggcatcgagctgctgtgggcggccaatgggctgccggagtacgatgtggcgctggccgcctttctggagcggtgagggacaaaaacaggccggggcggcagaagccgccccggccttactgtgcttgcacggacaggatcagaaataggtgaagtttatgggcttccgactccagccgatggcgcgctgcacgtcggcagcgtagccgtggtcggagagggtcaggcggcccaggcgaagggcctcgtccagagagaaagcgcccatcaccagggaagagagggtggagatatcggcggaaagggtgacgtcgggctgagcatgctcaaccacctccaccgtgcttccggatatattcagcaggaaggtgccgttgttgccctcgataaagttgtcatccacctggagggccagcacaaagggacggctgaccggggactcacagcggctctgcatgcggaagtaggccggcacatcgaagatacgggccatgtagcccattgtgcggcgggccacctcatggatgcagccgtcgtgcgcgcggttctcgcctgtgtccgggttgtggaacagcatagtcaggctggggtcgggggagaggatacgcacccgctcgatctgatccacctgggaggcgaaaaaggtcatgaactgccgcagcgtgtccagatcctcatacaccatctcggggacgagcagatcgtggtacatgtcggtgtagtggtccaccgccacgaaatcgaaggtgaagtagccggtgagccggccgtcccggcggcagaccaccacgtagggcatgtcgaagatccggtgagggtccatatagtggtggaccgtggcaccgtgggtacgcgccgcataggcgcggtagaagtccaaaatctcctgccggtcctccggccgggcataggacagcccggacttgtcgccgtaggagcggatcgcggagggcttgggctggtagagatagttctcgttgcagtaaccgtatcccatgttggcatagaacgcgggattgaaggggtggagacagccgatcggcgtcccctgtttggcgtaataccgcatcaacaccttcaggagcgtgcaggccacccgctctttcttgtggagaaagtttgcggagacataggctgcggcccccataggcatcatcacacctctgacgttgagggtgaaatccatcatcaggatggagcccagcagggttccatcgtcgtcaaaacagccgaggtaacggccctcgtccggacggtgcagttcgccttccatgttctggagcagggcggccggcgtcttggaggggaatgaggtcaccacattccgggccagctgctccacctcagaagggagaacgaatctgatatccatcaaaaccgattcctttctgtgaaacagagagtctatttacttgccgcgccggaggccggcgcagggggcggggctggctggacagcgcccgcaagggcacgggggagcccgtgtcaggtggaaccagacggttccatgcgcacctgctttgacgagccccattatgtcagcatttgccgcgaaagtcaacccgcagtttgccgaacgaaaaaaattgagccccggcgaaagaaaaggcttgacagagggctgcgccatggggtaaagtgagactggccatgctgcgaggaagcggcagggcttttggaagcgatgtagcgtcctgaacagcggttcagggcgctttttgtatttctaccggcagaaaggagcagcatatggacgccttcagtgttcgtacaaaaattatgatcggaggtggcatggacgcgctggcccagcggctgcaccgggtctttctggtgacggacaagttcatggacgagagcggcaaaacgaattatgtcaccgaccgactgctgcgcaacagcggcgagttcaagatcttctccgacgtgcaggccgacccggacatcgccaccgtcaccagaggcgtggagcagattctggagttccaacccgatgcggtggtggccttcggcggcggctccgccatcgacgcggccaaggcaatcgtgttcttcgccgcccgggagcgggacatgcgggactgcaagttcatcgccatccccaccaccagcggcaccggctcggaggtgagccgctttgcggtgatcaccgaccgggagaagggggtcaaatatcccttggtggaggacagcctgctgcccgacatcgccattttggacgcggagctgaccaccagcgtgcctcctaccgtgacggcggacaccggcatcgacgtgtttacccatgctgtggaggcctttgtgtccactgaggccaccgacttctccgacgcggcggcggaaaaggccatcaagctggtcaagcgccacctgctgcccgcctatcagaaccccgaggaccgcaaggcccggcaggggatgcacaatgcctcctgcctggcgggcatcgccttctccaactccggcctgggcctcaaccacggcatggcccacgccctgggcgcccggttccacatcccccatggccgggccaacggcatcctgttgccctatgtgatgagcttcaacgccggctgcgccgagcagctcacctccaccgccaagcgctatgcccgtatttcccgcctgctggagctggagagcagcagtgtccgccagagcgccctcaacctcattcgcaccgcccggcggtacatcgaaaagctgaacatgccctccaccctccaggccgcgggcgtgaacgcggcggagttcgaggaggcggtgcacgacatggcggaggcggccctggccgaccgctgcaccgccacgaaccccagaagctgcacggcggaggaaattgaacagatcttccgcaaggcctacagcgggaaattgccctgacagagctcctccgccgcgcaattgcgcggcggaggaatttggcgtaaaatgatatttcggattgacaactccgcaaatttctgttaaaatgagccagaaaaaatgatagagatgcgtatagtggaagggcggattcgtgcggcgttagtacggctcgcctggtaaacgatcaagagcgatgtagctcccaagaattttgacttgaaattctgggggctttttttgttttttcgccccgtacgcctgtgaaccccctgccggtgttgcggaaaacaccgcagcgcgtttacgcaggataggctgcccggccctgtggcatgatagggggggacagcccgctgtttccagcggtttttaggaggagcgtgccgatttgattgagcttgatgagaaaaagcggattatacaggaatttgtacccggcaagcaggtcaccctggcccatgtgatcgcaaaccccaccgaggatctgtacctgaagctgggactgatcgacgcctccggcgccattgggatctttaccatcacccccagtgaggcggccatgatcgccgccgatgtggccaccaagtcggccaacgtgtccatcggctttgtggaccgcttcaacggctcgttggtcatcaccggcgatgtggcggcggtacagtcggcgctgacggaggttatgaataccctgtgcggtatgatgggctttgcatcggcccccatcaccaagacgtgatgcaatggagagaaaaagacgcattatcctgatcggccgctccacggccggcaaaacaacgctttgccagcggatcaaccacgaggaactgcagtaccacaagacccagaccgtacagattgtcaaccagagtatgattgacacaccgggcgagtatctggagcggcgctattttcgcggggccctcatggtgacggccgccgacgcggacacgattgtgctggtccaggacgccaccgagaaggggagcatgttcccgcccgcctacagcagcatgtttgcaaagccctgcgtgggggttgtgacaaagtcggatctggcgtctgagcatgagatttcaaatgcgaggcagtatttgaaggcagccggcgcgggtgagatctttgtcgtcagcagcgtgacgggcgagggcgtggaagccttggtaaggcatctggatttcctttgaagtcaggaggagccgcatggaaaaggatgcgatccgtgtcgtcattgcagacgatgagccgatcagcagaatggatttgaaagaactgcttacggaaggcgggtatacggttgttgcagaggtctccgacgggtttgatgccgtggagaactgcaagctctaccatccggatctcgttctgctcgacatcaagatgccgtttctggacggactggccgcggccaagatcatctatgaggaggagctggcggacacgatcattatgctcacggcgtatagtgagcgggagttcgtggagcaggccaaggattacggcgtcagcggctatctggtcaagcccatcgacgagaagtcgctgattcccaacatcgagctggttgtggcccagagcaaggagatgaaacggctgcgcaaggacatggccaaggtttccgagcggctggccaaccgcagcatcattgaaaaagccaagggacaggtgatgcaggagcagaacctgtcggagcaggaggcgtaccactatatacgcaagctcagtcagctcaagggcctttccatgcgccgggtggcggagatgatcctcgtgaaaggcgggggttgacaggtgaatgtgatttggtccctctgcagaaagtataccgatctgtccgatgaagagatccgcatcatcgagcacatgtcagagacgctgcagcctctggccaatctggagggcgcggacatcttcatcgactgccccggacgggacgggaacgccatcgtggtggcggaggccaaaccggaatgtgtgccgtcgtcctacaagaacacggttgtgggactgctggccaagccggagaacgagccggcggtggcccgcaccttccgcctgggggtgggaaccaagcagatgaaggccgtgacccaggagaatgggagcacgatccagtcggtagagcccatccgcaacggctcccatatcatcggcgtgctgatcctggagaagcgggtggacgagcagaggcaggtcagtgagcggattcatttctcgcagcagagctttgagaccatcgcccacgccctggctcagatggtgccggagaacaactggctcaccgagtgtatcgacgaggcgctcctcatggtagaccgtagcggcatcgtgaccttccgcaactccctggcccaggatctgtaccggaggctgggctacattgaggacattctaggacagccctatgagaacgtccgcctggtggaacaggacggcaacagcgaggagtgcagcggctactcctatgtggagactacggtgagcaatctggtgctggacatcaagcacatccagctcaactcggcgggggcggccttcgccgtgatcattcaggacgtaacctggcggcgggagcaggagcaggcgctgattctcaagtctgtggccatcaaggagatccaccaccgggtgaagaacaacctccagaccattgccagcctcctgcgcctacagacgcgccgcaccgacagcgaggagacgcggcaggtgctgggggagagcatgaaccggattctctccattgccagcacccacgagctgctggctcagagcggtgtggacgaggtcatgctgggggaggtcatcctgaacataaagaacaataccatgcggtatttttccaaccccaaatgctatgtcaccattaccatggagggcggggactttcaggtggactccgacatcgccacgtcggtggccatcatcatcaacgaactgcttcagaactccctgaagtacgccttccaggaccgctcttccggagagattcggatcgtcgtggagcaggggaagctgtactccagcatccaggtcagcgacaacggaggcggattcgatgtggccaacacggagggcaaccgcctggggctgtccatcgtgcagacgttggtgaaggacaagctgcggggcaacctggagatcgagtcgggccccgagggaacctgcgccagattcgactttaaaaatcagatcatcggaacggccgacgtgacgtaacgacggctggaacagacgagcgacggagctcggatacagagggattctctgtacccgggctccgttttgcattgaactctcaggaagcgggtgaagcaagttgcatgaagtgatcctcagcgtgggcatcgatatcggcacctcgacgacccagctcattttcagccggctgaccatcgaaaaccgggccagcagctacaccgtgccgcgcatcgacattgtggataaagaggtgatctaccgcagcaagatctactttacgcccctgcgttcggccacggagatcgacgcggaggcggtcaaacggattgtgcgggaggagtaccaggcggccggcatgacgccggagatgctccgcacgggtgcggtgatcatcaccggcgaaaccgcccggaaggagaacgccaacgaggtgctggaggctctgtccgacctggccggggacttcgtggtagccaccgccgggccggatctggagtcggtgctctccgcccggggggcgggcaccgacgccctgtccaaggaaaagcgcacggccatcgccaatgtggacatcggcggcgggaccagcaacatcgccgtctatgagaagggcgtgctgcgggggacctgctgcctcgacatcggcgggcggctcatcaaggtggaaaacggccgcatcagctacattttccccaagatccaggccctggccgccgccaacggaatctcgctggcggtgggcgaccgggcctatcccgagcagctctacggcgtgtgccgcctcatggcggcccaactggcccaggccctccgcctggcgggggcggacagccaccacgccggcctttataccaacaacggcaagcctctgccggagcagccggccatcgccgcggtgacctactccggcggcgtggcggactgcatctatcaggagatggagggcgacgtgtttcgcttcggcgacatcggcgtcctcctgggaaaggccattcgggccgacccggatctgagccgggtggagcgctttacctccatcgagaccatccgggccaccgtggtaggggcgggaacccataccaccgaggtcagcgggagcaccatccactatgagcagggcacgctccccctgaaaaatgtccccattcttaaggtgtccgaggaagacgaggcgtcgctggaaacgctgaaggcttccattttgaatcagatgccgctgtatatgcctgagggaaaagcggagcagcttgcgatcgcttttaccggagaaaagcgcaccagctttgcggacattcaggcattggcggcagctatcattgagagcacgaaggaggtgatcagcagcaggtatcccttggtcgtggtggtggagaacgatatcggaaaggtgctcggaaacgcgctgaacgtactgctcaagcgggagaaggacgtcatctgcattgacggtatccgcaccctgagcggcgactacatcgatatcggcgagcccattgcaggcgggcaggtgctgcccgtagtgatcaagaccttgattttcaattcttaatgttaggacttatgagaggtgaactagcatgatcctgaagacaaagctgttcggccatgtgtacgagttcaaatcgattcgggaagtcatggcgaaggcaaacgaggaaaaatccggcgacaagctggcaggcattgccgccgaaaccgcagaggagagagtggccgccaaggtggtgctctccaatctgaccctgaacgatctgcgcaactgccccgccgtcccctatgaggaggacgaggtgacccggatcatccaggattctgtcaacgagaccatctttaacgagtataagaatatgacggtggccgagttccgcgagtggctgctggatacccagaccacccccgacatgatccgccgggcctcccgcggcctgacctctgagatcgttgccggcgtgtgtaagctgatgagcaacctggacctcatctacgccgccaagaagatgcgcgtgaccgcccactgcaacaccaccatcggtctgcccggcaccttctcctcccgtctgcagcccaaccacaccaccgatgatcccaatggcatcatcgcgtccgtgatggagggcctgtccctgggctgcggcgacgccgtcatcggcctgaaccccgtggacgactccgtggagagcgtggcccgcatcctgaagatgttcgacgagttcaagcgcaagtgggaggttcccacccagatctgtgtgctggcccacgtgaccacccagaccgaggccgccaacaagttcggagctcccctcgacctgatgttccagtccatcgccggctctcagaagggcaacgaggccttcggcctgaacgccgccatgctggacgagggccgcgccaccatgctgtcccgcggcacctgcaccggacccaacgtcatgtactttgagaccggccagggctctgagctttcctccgaggcccacaacggctgggaccaggtcaccatggaggcccgctgctatggctttgccaagcgctacaaccccttcctggtcaacaccgtcgtcggcttcatcgggcccgagtacctgtacgattccaagcaggtcacccgcgccggcctggaggatcacttcatgggcaagctgaccggcatccccatgggctgcgacgcctgctacaccaaccacatgaaggccgaccagaacgacatcgagaacctggcgaccctgctggtggccgccggctgcaactacatcatgggcgtgcccgagggcgacgactgcatgctgatgtaccagtgcaccggctaccatgaggctgctgccctgcgcgaggtctttggcctgcgccccatccacgagttcgacatgtggctggagaagatgggcttctctgagaatggcaagctgacgcccaaggccggcgacgcttccgtgttcctgaagaagtaaggaggagcgaagaatggacgaaaaagatctgagaagcatcattgagcaggtgctgacggaaatgaatgtgtccggcgccaagcccgccgagaaggccgctgccgcttgtgcgtgtgagtctgcgccggaggttgaggacggctgcatccccgacatcacggagatcgacatccgcaagcagtatctggtaaagaaccctgagaacggcgaggagtatgccgagctgaagatgaacgctccctgccgtctgggcatcggcaaggccggcgcccgctacaacaccctgccccagctggagttccgcgccgcccactccgccgcccaggacgccgtgtttaacgatgtggacgccgagttcgtggagaagatgggcctgtggacggtgcagacccagtgcgacagcaaggacacctatctgacccgccccgatctgggccgcaagctcagccccgaggccgtggaaaccatcaaggccaagtgcaagaagaaccccaccgttcagatctacgtggcggacggcctgtcctccgccgccgtggccgccaacatcggcgatctgctgcccgccatcatgcagggcctggagagctacaagatcgatgtgggcacccccttcttcgtgaagtatggccgcgtgggcgtcatggatgagatctccgagctgaccggcgccaccgtcacctgcaccctgatcggcgagcgtcccggcctgatcaccgccgagtccatgtccgcttacatcgcctacaaggccaccgtgggcatgcccgaggcccgccgcaccgtggtgtccaacatccaccgggccggcaccatccccgccgaggccggcgcccacatcgcggaaatcatcaagatcatgctggataagaaggccagcggtaccgatctgaaactgtaagagcagggaggaaaatcaatatgaaacgcgatccgttgcccgcacatgtactggcgactcgcattatccccaacgtggctcccgacatggcgaaggagctgggcctgacccctgaccagaagtccctggccatcgttactgccgacagcgacgatgtgacctacaccgccctggacgaggccaccaagaaggccgactgcaaggttgtctacgccaagagcttctacgccggcgccgccaacgccaacaccaagctggccggcgagatcatcggcatcctggccgctcccaaccccgctgaggccaaggccggcctggaggcctgcgtggacatgatcgagaatgtgtgccactttgtctccgccaatgacgacgacagcatctgctactatgcccactgcatctcccgcaccggctcctacctgtccgagggctgcggcattgccgaaggcgaggccattgcctacctgattgcgcctcccttggaggccatgtacggcgtggatgccgcgctgaaggccgccgacgtgcggatgtgcgtgctgtacgcccccccgtctgagaccaactttggcggcgccctgctgaccggcagccagtccgcctgcaagtccgcctgtgacgccttcgccgccgccgtcgagtccgtcgccgaccagcccaaggtctgaccggcagagcgaccgggcccgcacgggcccatgaacggaggtacatatgaaggcattgggtatgattgaaacccgcggcctggtcgcctccattgaggcggccgatgccatggtcaaggctgccaacgtcaccctccagtgcaaggagcatgtgggcggcggcctggtgaccatcatggtccgaggggatgtgggcgccgtcaaggcggctacagacgccggtgccgcagcggcggaacgggtgggaaccctgatttccgtccacgtgatccccagaccccatgaggagctggaagaaatcctgggacacatccccgccgaaccagaccagccggttccccccacgcctcccgccccggcccctgagccggagccggaggagggtgagccgctggagccggaggagcaggagagcgatggcgcggtgatggagcccgccagcctgaccacggaggagctggagcatatggcggtggtaaaactgcgggccgtggccagacagatcggcctgaccagcatgacgcgcaaggagatccggtttgccaagaaggaagagcttctcgcggcaatcacggcgttcctggcggagcaaaacaactgagcatgcttcgcggtttgagactgcccccggcatgagttcagcgaaaggaatggaactgtatgcagctaatcgataaagatctcctgtccatgcaggaggttcgggagctggtagaggcggccaaggaggcccagcaggagctggcccggatggaccaggcccaggtggaccgcattgtgcgtgccattgccgacgcgggtgtgcgcaacgcccgccggctggcccagatggccaacgaggataccggctttggcatcgtggacgacaaggtgatcaagaacatctttgccagccgcggtgtctacgagcacatcaaggatatgaaaaccatcggagagatcagccgggacgacgccaagcgcctgcgcaccatcgcggtgcccgtgggcgtgatcgccggcctgatcccctccaccaaccccacttccaccgcactttacaaggcggagatcgccatcaaggcgggcaacgccatcgtgttctccccccaccccacggccctgcgctgcatcctggagaccgtcaaggtcatccggcaggcggtggccgaggcgggcggcaatgagaacctggtctcctgcatcaccatccccaccatggaggccaccgacaacctcatgcgccaccgcgacgtggccatgatcctggccaccggcggctccgccatggtgcgggcggcctactcctccggtacccccgccatcggcgtgggccccggcaacggccccgcctacctggagaagacctgcgacctgcccctggcagtgaagcgcatcctggactccaagacctttgacaacggcaccatctgcgccagcgagcagtccatcatctgcgacgatgacatggtgcccgccgtcaaggccgagatggagcgccagggggcttacttcctggacgacgaggagcgggagaagctgggccgcttcattctgcgggccaatggcaccatgaaccccgagatcgtgggccgcagcgtgaagaccatcgccaatctggccggcctggagaaggttcccgccaccgcccgcgtgctggtggccaaggagaccggcgtgggccgcggccatccctattccaacgagaagctgggacccatcctggccttctacaccgccgagaactacgagaaggtgtgcgagaaggtctgtgagatcctccactacgaaggcgcgggccacaccttctctatgcacaccaacgacgataagatggtggactacttcgcccgccgggtgcccgcctcccgcgtgatggtgaacacccccagcgccctgggcggcatcggcggcaccaccgccctccagcccgccctgaccctgggctgcggcgccgtgggcggctccgccacctcggagaacgtgggccccatgcacctgctcaacctgcggtatgtggcctacggcctcaaggagctggacgagatccgcgcctccgtgccggactgctccgacggcgtctgccgcacggctccctctctggagaacatcgatgtggacgacatcgtccgccagatcatcggtaagctccagaagctgtaacccaatctcatccgcgtacagcgcggtttacctgtgaaaggaaggatcacaaatggcgaatatgatgcaagctctgggtatgatcgagaccaagggtctcgtggcctccatcgaggcggccgatgccatggtcaaggcggccaacgtcaccctgatcggcaaggagcacgtgggcggcggcctggtgaccgtaatggtccgcggcgacgtgggcgcggtcaaggcggccaccgacgcgggcgcggcggcggccgagcgcgtgggcgagctgatctccgtgcacgtcattccccgtccccacgaggaagtggagtccatcctgccccacctgggctgaggcagcctgacgcaaacaagtaaaggagtgtccctgttatgaatatgatgcaagctctgggtatgatcgagaccaagggtctcgtggcctccatcgaggcggccgacgccatggtcaaggcggccaacgtcaccctgatcggcaaggagcacgtgggcggcggcctggtgaccgtgatggtccgcggcgacgtgggcgcggtcaaggcggccaccgacgcgggcgcggcggcggccgagcgcgtgggcgagctgatctccgtgcacgtcattccccgcccccacaacgaggtggagtccatcctgccctccctggagaagtaagatacgggcgtagcccgtgtcccatcaaccataggaaggggtggagcgcgtgaaggcaattacagaagatttcctccgggtggagctgcggaacacccagcccgaggtctactacatcccggaggggaaaatactgacgcccgcggcgcgggaatatcttcagcagcgcaaaatcaaagtggccgcaggggggcagccggcggagccggcccccgcggccgccccggccgcccagccggtcgtcccgaccgtgatgtgcgccccggagccgcccaagcccaagtacgtggactatgagaccggcgcctactacatggaaaagccggagcatatgacccagctgttcggcaacgtgctggtggccaaggatcacccccgcatccatttccgcggcaagctggacagcctccaggccctggtggtgctggatcaggttcagatcgccgagggcggctgccagaagctggtggacgacctggggaacatcctgggcgttctccgggagatgatgcgctgcgacgtgctggacgaggcgttcaagaacgagaccatcattggtctcacccacgccgagctgcgggagcgttcccacaatccgcagaagttcttcggcgtgcagtacatgcagctgcccgattacaccatgggcagggattatgcgctgctcaaccagctccgcgccgccgtccgtgagacggaggtagcggcgaccgaggccttccgggtgggcaacaaatacacccggaaagatatcatcgaggaactcaaccgcctgtccagcgccattcatatcatgatgtgcatgtacctggcgggccagtaccgctgaggaggaacaggcatatggaacaaatcgtatccgcagtgatggatgcggtccaccgggcgggactggtcgaggtggaggtctccgcgcggcatgtgcatctgtcacaggccgatgtggaggtgctgttcgggcccggcgccaggctggagcccaagcggccgctctctcagccgggccagttcctgtctgagcagcgggtcacactggtgggccccaagggccggaaggagcgcgtggcggtccttggcccggcccgcaaggccacccaggtggagctgtccaagagcgactgcatggagctgggggtcaaggcccccgtccgggagtccggcgacgtggccggctccggggccatcaccattgagggcccctgcggcacgctggagctgaaggagggcgtgatcatcgcccacaaccacatccacgtcaccgcgccggactccaagctgctggatctgaaagacaagcagcgggtgtccgtggccgtgatgagcgagcggcccgtgattttccaggatgtcatcatccgggtgagcacggaatttagctgtaagatgcacattgacgtggacgaggccaacgcggctctggtgagcggctttaccctcggcaagatcatccgataatcaacagaaggagcgccagcgacatgatggacttggaccgcgtaaacaactacctcgcccgtgtggaggaatccgaaaaaaccaccttcaagccggtgggaagccggctcaaggtgggcgtggatctgggcaccgcctacattgtgctggtggtgctggacgaggaaaacaaccccgtggcctgcgagaagcaggcggcccaggttctgcgggacggcgtggtggtggactacaccggcgcgctgcgcattgtacggtcgctcaaggaaaagctggaggcccgcctgggcaccgagctgacccactgtgccatcgccatgccggcgggcaccgagtccagcgtcaagacccaccagtacgtggctgagggcgcgggacttgaggtgaccaacatcctggacgaacccagcgccgccaacgccatctaccagattgaggacggcgtggtggtggacatcggcggcggcaccaccggccttgccatcctgaaggacggcaaggtggtgcagattgaagacgagcccaccgggggtacccatctgaccctggttctgtcgggcaactatcacgtctccttcgaggaggcggaggccatcaagcaggactacaagcgccaccgggagatcctccccgtggtgcgccccgtggtggaaaagatggccacgatcgtgagccgctatgtggataaggcccacacggacaccatttacctctgcggtggcacctgctgcctgacgggcatcgaggacatcttccagaaggtgacgggaatccggaccattaagccggccaaccccttcctcgtgacccccacaggcattgccatgaactgtaccctggaataaaccccttaaattcatgaacagaaaggaggggaagccatggaacaaacgctgctcaatgaaattgtagcccgcgtggccgccaagctggcggaggtggaagggggcgaggccgccccggccgccgcagaccgggatgaccgggagggcctgctgctgctcagccaggagatgaacgacacctgccgggccatgctgaagtgcgagaagctgaaggcgcggttccgtgtggactgcgcttccctccagagtgagccggccgagttggattcctatggcgtggttgtgctcaccgggctcaccaacgaggcccttgccaagctggccctgggcctgtgcgacaccccctatacccgtctggccgcccaggccatcctggcgggcaagcgggtctacgtacccaccgaggaggtggagctctaccgctacgcctccaccgccccggcggcctactacgccatgatgaaggagcgcctggacctgctcctggcctccggcgtggtggtctgctccaaactcaacctggagggactcctgctgggcggcgcggcctgtgaggcggctccggcggaggggcccgcggccgcggaaccctccgcccctgcccccatgcccgcggctcgtgaggagaagctggtccatgtgaccaagcgggtgctcacggagcgggacatccgagacgccgcggcggaaaaggtcacctgcatccatgtccccgccaagtgcatcctgacggctctggccaaggactgcgccaaggagcacgggatccggctggttcaggagtgaccccgggccctgagccccattacccgaaaaaggatggatcaaggctatgaaggtagcaaaggtgatcggcaacatctgggccacccgtaaggaagaaaaactggcgggcctgaagctgctgctggttcagccgctggatgtgctgacgggaaaagcggaacggccccccatcgtggccgccgatatcatcggcgccggcgtgggggagaccgtgctcgtggtcggaggcagttcggcccgcagcgccgccggcgatatgagcatcccggtggacgccaccgtggtcggcattgtggacgaccaggagatcgaccgcagcgtgctcccctgacggggaggcgccgcggcggcccggcggaaacttccgcgaaaggaatggtcatacgtcatgaatctgaccgaagcggtcaaggctgcgggtgtagtcggcgccggaggcgccgggttccccacccatgtaaagctctcagccaaggcggagtgctttatggtcaacgcggccgagtgtgaaccgctgatcgaaaccgacaaatatctctgccgtaccttccccgaccgggtggtggccgccgcggtggcggtggccgggcacctgggcgcgaagcgcacggtgatcgccctgaagggcaagtaccacgcggagatcacggccctggagggggctatcagccggagcggcgcccaggtggagctgttccggatgaagaccttctatccggccggcgacgagcagaccatggtgcagcaggtgaccgggcgctccgtcccggagcgggggctgcccctggacgtgggctgcgtcgtggacaacgtaggcaccctgctcaacatccaggatgccctggagggaactccggtgacggagaaatacctctccgtggtgggcgaggtcaaggagcccattctcctaaaggtcccggtgggcacggccctcacggcctgcgtggcggaggcccggcccaacttagcggactacgccctcatcgtgggcggacccatgatgggcaagcccctcaccgaccgggctgccattgaggcggccgtggtcactaagaccaccggaaacctgatcgtcctgcccaaggagcactacctgttccggcgggcccagctcccgatggagaccatccgccatcagaccaagagcgcctgcatccagtgccgcatgtgtaccgatctctgcccccgctatctcatcgggcaccagatccgccccaacctggtcatgcgcaacctgtggcgggaggggagcatcgaggacaacgaggagtatctgcgctccttcggcgacgcggccaactgctgcgactgcggcgtgtgcgagatgttcgcctgccccatgggcctgtctccccgcaaggtgaacggctacatcaagggcgagctgcgcaagcgcggcattcaggtgccccggaacatggagccccacgcccgggagtttgtggacgagcgcaagacgcccaccgaccggctggtggcccggctgggcctgtcggcctactacggcctgcacgcccacacctgcatccccctggagccggagacggtattcatcccgttccagcagcacatcggcaagcctgccgtgcctgtcaaggccgtgggcgacccggtggcaaagggagagcttctggctcaggccgccccggacggcctgagcgccaacatccacgccagcatcgacggcgtggtgacagaaatcactccggcgggcgccaggctctgccggaaggaggtatgaacggtatggcaaacgccatcggcatggtcgagctgaccagtattgcccggggcattgagaccagtgattttatggtaaaggcagcccaggtggagctcatccgttcctctaccgtgtgtcccggcaagtacattatcatcatcgcaggggataccggcgacgtcaaggcctctatggccgagggcatccgccagggcggcgagagcgtggtgaacacgctgctgctccccaacgcgcatccccaactgattccggctatcagcatgaccacccagccccccgcaggcggcgcggtgggcgtgctggagttctattccatcgcctcggccattacggccgccgatgtggccgccaaggcagccaacgtgaccctgatcgaggtgcgcattggatacgccatcggcggcaagggctttgtcaccctgaccggggatgtgggggcggtgcgtgaagccgtggccgctgcgtcccgtgacgcggagctgctggtgggcacctccgtcatcccgcgccccgcgcagcaggtattccagtccctgctgtaagcgcaaagagaagagagaccttcaacccccaaactgttttgagagttagagaaggagtgtaagtaatggattttagcgaactgatcgcagctgctgaccccagtatttttactgagagtatcaaagcctgggtttccggactgaacatcaactccgtcatcatgctgatcatgatgatcttcatgattgtgggcgccattgaccgtatccgcggcaataagctgggctacggcgagaagtttgaggacggcttcaacgccatcggcggcctggccatcgccatggccggcgtgtatgcggcggcccccgtgctgtccatggtgctgggccccatcatctcccccatctacaccgccatcggcgccgatgcctctatgttcgccaccaccattctggcctgcgacatgggcggctaccctctggctatggagctggccagcgacccctccatcggtaacttcgccggcctgatcctgggcaccatgatgggccccaccatcgtgtttaccatccctgtggccctgggcatcatcaagaaggaagaccgcccctacctgggcgccggcgtcctggccggtatgatcaccatccccatcggctgcatcgtgggcggcctggtcatgaacatgaccccctataagatggacatcggccgcatcctgattaatctggtgcccgtcatcgtcatcgccgccctgatcgtcatcggcctgtggttcgcccccggtcccatgatcaacggcttcaacaagttcggcaccggcgtcaccgtggtcatcaccgtcctgactgccatcgccgtgttccagcagatcaccggcatcatgttccccgtgttcgatgtgatgtccacggtggatcccgacctgggcatgactccgctgaacaacggcctgctggtctgcggccagatcggcattgttctgatcggcgccttccccatggtggagtggatcacccgtaccttcggcggcgccctgtccaagctgggcggcgccctgggcatgaatgacaagggctccgccggtctggtggctaccctggccaacaacatcgccatgttcaacatcatgggcgagatgaaccccaagggcaagatcctgaacgtggccttcgccgtatccgccgccttcgtgttcggcgaccacctgggctttgccgccggcaacgatgcccagatgatcttccccatgatcgctggtaagctggtggccggtgtcaccgccctgattgtggccaacctcctggcccccaagctgctctccaagatccagaccatttccaagtaatcgagtaaggccaataccggaaaggcaaggaatctatcatgaatgtaagcgaagcgctcatccgcgagattgtcaccaaggttttggaggagtccgcgggcaagggcagcaagcccgagtttgaaaagcacatcgatcccagcgggatcatcggcatcaagaccagcaccgtcaagtgcgagcccttccagcaggacggcgtcaagctcaaggacgtggtgacgctggaggaggccccccgcatgggctgcggcatcatggagctggatcacaccagcttcgagtggaccctcacctatgatgagtacgacctggttctggacggcacgctggagatcgagatcgacggccgtgtggtgtccggaggccccggcgacatcatctatatccccaagggaagccacattcacttccagacccccaaccggacccgctacgcctactttgtctatcctgccgactggcagtaagggcatggcggtgtcaggccgtccctcctttgcccgcaccagcgggcaaaggagggaaatggcttgacatgggaagaaagagggactataatctacctatacaatggaatactgaatggtatacaggtgcgcctcctcccggagacgctgaaaagggaagcgggtgtgaatcccgcacaatgccgttgctgtattggtggagcggttcttataggtcactggggctatgccctgggaaggcgagaaccgcgctggatgcctgagtcagaatacctgcctgtatatgacgcacaggaagcctccccggtccagggagggtgcagttgcttatgattgagacaggtatcataaggtttgtttgctgtacccgtggaggtacagtttttttgttttgtggatccagagaccacctctctttgtgatttggcgcaggcatgggctgtgtctgccagcacagcccatgccgcaccggcacggcgaatgataggcgcttttctccatgcagatgctatgcagtggaaaaaagtcgttctgacttgatatatggatagggctcaccccgcaggagcggctccgaggcaggggccgctcccaaactttgtatggaggcagacggacaggcaagcctgtggcagcgtggggcaggggaaaacaggccggagctgccaaccgccgtataaacacagacatggaaccccaaaaggggccatcactccggtgatggcccctttttgagctatggccgtaagcctcacagcaggagggcggccagatagagcggcagattgacggcgagaaccgccagagatacgccgcccacgagaacagcgccgctcaaggcaagtaccgccgtgccggtcacaatggggtgggccttcagcccccgggcgaggcagccgctgacggccgatttccaactggctcgggctgcggtgcggggggcggggacagacgagtggactggataggcatacatcagaaggactcctctctgcagcggtgtgtcacagtgcgctgaatactctctttacagaatcagtatagcgcgaaagggattaggaaggtgcaagaggagagtggagggcgttaagaatccataagaatcccacaaagctaaaaatacaaatattaccacaacaaaaagaaaggataagggaacatgcggatgtgttaaggctgaattaagattgtgaaaaagctcttgatttctttccggaacgtggtaaaactcatacgtgcaatcgctggaggcagaggcggggttctgcggcccggcggttgggaatcagcgcgtcaggtccggaccgcgggagacgaccggcaccgctccggcggtggagagcacgcggagacggacacaaggagggaaacaagatggacgtaatggatctcgctatgatagccactctggtcgtgagctttgtcctggtgaaactgttggccgactggtgcgaccgccagatggacaaataagactgttttgctagaaaagaggaagtgctagttatgattgctttgggtatcgtcattatcgcgctagcgtgctatctggtgtacgccctggccaacccggaaaagttctgaggcacagaggaggaattttgcaatgctgcaaatcattctgaccctggtgattttcgtgctgctgatcatcccgatcggccgctatatgttccacatcgccactggtcaacatacgttttgcgaccccgtgttcaaccgcatcgacaatggaatctaccgcatctgcggtatcaatcagaatgagggcatgggctggaagaaatacgccctggctctggtacttaccaacgccgtcatggtgtttatcggctacctgatcctgcgcatccagttcctgccggtcttcaaccccaacggcatcggcgccatggagcccaccctctccttcaacaccattatctccttcatgaccaacaccaacctgcagcactactccggtgagagtgggctgagctacctctcccagatgctggtcatcatcttcatgatgttcgtctccgcctccaccggctacgccgcctgcgtggctttctgccgcggcctgacgggcaccagcaagaacaacctgggcaacttctatgtggatctggtgcgcatcaccacccgcatcctgatccccttctccattatcgtgacactgatcctggtgtggcagggcgctccccagaatttcatggccaaccagacggtgaccaccatcgagggcaccaagcaggacatcgccatgggccccatcgcctccctggtctccatcaagcacctgggcaccaacggtggcggcttcctgggcgccaactccaccaccccgctggaaaaccccaccatcatctccgacattaccgagctgctgagcatgatgatcctgcccggcgcctgcgtgatcatgttcggcctgatgtaccacaaccgcaagaagctgactgatgaggcgcaccccgtcgtgggccgccgcctgaccgaccgccagcccatcttcggcggcgagggccgcaccgtgttcgtggccatgggcatcatcttcctcatcggcctggccgtgtgctacttctccgagctggcgggcaaccccaagctggcggagattggcctgagccaggagatgggcagcatggagggcaaggaggtccgcttcggcatcgcccagtccgccctgttcaccaccgtcactacatccttcaccaccggcaccgtcaacaacatgcacgacaccctgactcccctgggcggcatgatcccgctgctgcacatgatgctcaactgcgtgttcggcggcaagggcgtgggcctgatgaacatgatcatgtacgtcctgctggccgtgttcctgtgcggcctgatgatcggccgtacccccgagtacctgggcaagaaggtggagggccgcgagatgaagatggccgtgctggtcctcatcatccaccccctgctgatcctgggcttctccgccctggccgtcggcaccgaggccggccgcgccggtatcaccaaccccggcttccacggcctgagccaggtgctgtacgagtactcttcttccgccgccaacaacggctccggctttgagggcctggccgacaacacctacttctggaacatcaccgccggcctggccatgttcttcggccgctatctggccatcgtgctccagctggccatcgcctggtctctgctgtgcaagaagcgcatgaacgagtccatcggcaccctgaagaccaacagcatcggcttcggcgtcatcgtggccttcgtggtctacatcttcgcggcactgacgttcttcccggccctggcccttggccccatcgccgagcatctgtccatctggctgccggtttaaaggaggattactgatcccttatgaaagataagcatcggacgaaattcgtaacaaaggacatctttaagtcctctgtcatcggggcgttcaccaagctgaaccccaaatacatgatgcacaatccggtcatgttcgtggttgagatcggctttgtcatcgccctgctgctctccatcttccccgagctcttcgggcccaccgacggcatcaacaatgtccgcctgtacaacatctttgtctgcgtcatcctctttgtcaccgtcctcttcgccaacttcgccgaggcggtggccgagggccgcggcaaggcccaggccgagagcctgaagaagacccagaaggacaccaaggcccgtctgctcaaggccgacggcaccgagaccgtcgtctcctccagcgagctgaagaagggcgacgtggtcatggtcagcgccggcgagatcatccccaacgacggcgaggtcatcgagggcaccgccagcgtggatgagtccgccatcaccggcgagtccgcccccgtgctccgcgagtccggcggcgacttcgcctccgtcaccggcggcaccaccgtggcgtccgactggctgaagatccgcatcacctccaaccccggcgagtccttcctggacaagatgatcgccctggtggagggcgcctcccgcaagaagacccccaacgagatcgccctgcagatcctgctggtggccctgaccatcatcttcatgatcgtcatcgtcaccctgtaccccatcggccgctacagcggcgtcaccctgcccgtgtccaccctgatcgccctggcggtgtgtctgatccccaccaccattggagctctgctctccgccatcggtatcgccggcatggaccgcgtcacccgcttcaatgtcatcgccatgagcggtaaggccgtcgaggcctgcggcgacgtggacaccatgatcctcgacaagaccggcaccattacttacggcaaccgcatggccgccgacttcatccccgtcagcggcgtcagcgtggaggagctcaccaagtatgcggccctctcctccctgagcgacgccacccccgagggcaagagcgtggttgccctggccaaggagcggggcgtcgtggtggacgagagcaacctgaagggcgccgagttcatcgagttcaccgccaagacccgcatgagcggcgtggatctggccgacggtacctccatccgcaagggcgccagcgacgccatcgtggagtacgtcaagggcctgggcggcgccgtgccggccgatctgcagggccacaccgaccaggtgtccaagcagggcggcacccccctcaccgtctgcgtgggcaagcgtgtgttgggtgtcatctacctgaaggatatcgtgaaggacggcctggtggagcgtttcgcccgcctgcgcgccatcggtatcaagaccatcatgtgcaccggcgacaacccgctgaccgcggcgaccatcgcccaggaggccggcgtggacggcttcatcgccgagtgccgccccgaggataagatcaaggtcatcaaggaggagcaggctcagggcaagatcgtcgccatgaccggcgacggcaccaacgacgcccccgctctggcccaggccgacgtgggcctggccatgaactccggcaccaccgccgccaaggaggcggccaacatggtggatctggactccgaccccaccaagatcctcgaggtcgtggagatcggcaagcagctgctcatcacccgcggctccctgaccaccttctccatcgccaacgacatcgccaagtacttcgccatcatccccgccatgtttatgatggtgattccccagatgcaggtgctgaacatcatgaagctggcctctcccaccagtgccattctgtccgctctgatcttcaacgccatcatcatcccctgcctgatcccgctggccatgcgcggcgtcaagtacaagcccatgagcgccagcaagatgctgacccgcaacatgctcatctacggcctgggcggcgtcatcgtccccttcatcggcatcaaagtgatcgacctgatcatcgcgcccctgctgacgatgctcggcctcggcatggcaatgtaacaggaggaaaccgaacatgaaagtgatcaaatctctcagagcgccggttctggtgaccctggtactgctgctgatctgcggcctgatttacccggttgtcatgacggggctgagccaggcgctcttccccagccaggccaacggcagcatcatttatgtggacggccaggccgtgggcgccaagaacgtgggccaggatttcactgacccccgcttcatgcgctgccgcccctccgcctaccagtacaacacctatacggaggatgaggagggcaataagttctacaacgacggcagcgagtacgccggcgtggcctccggctccaacaactacggcgcgtccaaccccgctctggcggagcgcgtgcagggcgacatcgacgaattcctggcggagcatcctgacctgacggtggaggacatccccaccgacctggtgacggcctccggttccggcctggatccccacatcagccctgcctctgcggctgtgcagattccgcagttggcggagaacaccggcctgaccgaggagcagctggagcagttcgtggcggacaacaccaccggcaaggtgctgggcatcttcggtgaggagacggtgaacgttctgggcgtcaacctggatatcgccgaggccctcggcctgatcggcggcgtagactaatcgctcaaaagcccccctgaaccttgacccggattggttcaggggggctttctgcggcgcagagagagggtgaacatcatcagaattgccttgatcgcaccacaggagaaggcccggcagcagctccgggagcagatgttttcctatgcggtgcgctggaaggtcgccgtggtgaccgactgcttcgactgcctggaggagttcgccatggcggcgcagagcggtggataccaattagtctgcctccgcggcggcgagcgccagtggagggcggcggaggagctgcggcgcatccgcggagagggggagaccctctgggcctatctggaggagggacaggccctgcgggccaaggtgctgaccgcggccgacaccttcggcgccgtggagtggcggcgggtgagcggcatgaacaccgtcatgacggactatttcgcgctggctccccgccacgcgcgggatgccattctgcccattaagcacccgctccgtaccgatgatatccactacattcaggcgcagaagcagaccctgctgctctacaccgcctacgaccgcgtccgggcccggctgggctttcaggccatggccctgctgctggacggcgagccccagtttctgatctgcccgggcggcctgattttgaacaccgacaaggtctcccgggtggagggccgggtggtggccctggaaaatgggaaacggctgatgctggaggagccggcggtccgggagctccaggcccgccgggcggtccgcctttcccatatgcaggcgcaaacggtctgagtcagatgactcagaccgttttttgtgctataatagggcagataccacagagagaaggggacgatttcatgaagtatgaggacatccggcggcaggtgctcaccgccatccggcaggccagcgctcaggggctgatccacgggacatcaggcaatatctccgtgcgggaccgggaggcgggggtggccgccatcacccccagcgggcggccctatgacactatggagccgggagacatcgccattgtcaccctggacggggagtgggtggatgggccctacgcgccctcctctgagacccccatgcacacggcggtttaccgcgcccgccccgacgtgggggcggtggtgcataaccacgccctgttctgcaccgtgatggccatggcggtggatgagctgcccccctccacgccgccccaggcggagttcgcccccatccgggtggtgcccttcgcggtgcccggctcccgggcgctggccgcctcagtgaccgccgccctggggacggacgggctggccgtgctgctgcgcaatcacggcagcctctgctgcggccgggacctgcccgcggccatgaacgccgccgcctatgtggaggaggcggcccaggtggcctactacgcctccgccctgggccgcttcaccccgctgggcgaggcggacattcgggcctgtaaggagatgctgaccgccgggcgggcggtctagccgacgaaagggaacgaaacagccccggccgcaatgcggccggggctgtctgtttacggattgaccacctcgccggtgaagacgctcttgctttccaccgtcagctcgccatcccggcagtccacggtgagggtgtcgccgccctgcacctcgtcggcgatgatcttccggctgatgagggtctccacactgtgctgcacgaagcggcgcaggggacgggcgccgaaggccgggtcgtaggcgctgtcgatgatgtgctgcttggccgccggggtgagggccaccttgagctgcttatcctccaggcggcggttgagctcggccaccagcagattgatgatgtgggtgatgttgtccttggtgaggggcttgtagaacacaatctcgtccagccggttgaggaactcgggccggaaggagtggtgcagcagatcgttgacggcatttttcgcctcggcggtgatgtcgcccttcttatcgatgccgtccagcaggtactgggaccccaggttggaggtgaggatgataatggtgttcttgaaatccacggttcggccttgactgtcggtaatccggccgtcgtccaatacctggagtaatatgttgaacacgtcggggtgggccttctccacctcgtcgaagagcaccacggagtaggggtggcggcggacggcctcggtgagctggccgccctcctcatagcccacgtatccgggaggcgcgccgatgaggcgggagacggagaacttctccatatactcgctcatgtcgatgcgcaccaggttcttctcgctgtcgaacagggcctcggccagggccttggccagctcggtcttgcccacgccggtggggcccaggaacaggaaggagccgatgggacggtcgggatcggcgatgcccgcccgggagcggagaatagcctcgctcaccaggcgcacagcctcgtcctggcccaccacccgctggtggaggatgtcctccaggtggagcagcttttcccgctccccctccatcagcttggccacagggatgcccgtccagcgctcgatgatgcgggcgatctcctcctcggtgaccttgtcccgcagcagggaacgggccttaccctcgttggcgatggcctcctcggcctccagctgtttccgcagctcggggatgcggccgtactggagctcggcggcgcggttcagatcgtactgccgctgggcggcctccagctcggcgttggcgctctccagctcctcccggagcttctgcaccttgccgatggcgttcttctcgttttcccactgggccttcttggcgttgaactcgtcccgcatctcggccagctccttctggatctcggccagatgctccctggacaaggcgtcgtcctccttcttgagggcggcctcctcaatctcgtgctggatgatcttccgctggatgacgtccagctcggtgggcatggagtcgatctcggtgcggatcatggcgcaggcctcgtcgatgaggtcgatggccttgtcggggaggaagcggtcggtgatatagcggttggacagggtggcggcggcgatgatggcgccgtcctggatcttgacgccgtggtacacctcgtaccgctccttcaggccgcggaggatggcgatggtgtcctccaccgtgggctcggagaccatgacgggctggaagcgccgctccagggcggcgtccttctcgatatactggcggtactcgttgagggtggtggcgccgatgcagtgcagctcgccccgggccagcaggggcttgagcaggttgcccgcgtccatggcgccctcggtcttgcccgcgcccacgatggtgtgcagctcgtcgataaagaggatgatgcggccctcggactttttgacctcgttgagaacggccttcagccgctcctcaaactcgccgcggtacttggccccggcgatcagggaacccatgtccagggcgaagatggtcttgtccttcagggaggcgggtacgtcccccttgacgatccgctgggccagcccctcggcgatggcggtcttgcccacgccgggctcgccgatgagcaccgggttgttcttgctcttgcggctcaggatacggatgacgttgcggatttcgtcgtcccggccgatgaccggatccagcttgttggccctggcccgctccaccaggtcggagccgtacttcttcagggcgttgtaggtctcctccgggttgtcggaggtcacacgctggttgccccgcacgttggtcagggcctggagcacgccctccttctgtacgttgtaggtgcggaacagctccttcagctcccggttggccgtgtccagcagggccagcagcaggtgctccaccgacacatactcgtccttcatggacgcggcgatgctctcggcggtgttgaggcacttgtccacgtcctgggccacatagatcttgccctgctcccggccggagccggacacccggggcagcttttccacctccgccttggcggcggcggtgaaggaggggacggtgaggcccatgttccccagcagctgggggatcagcccgccctcgtccagcagcagggccagcagcaggtggggctgctcaatctgctggttgccgtactcggtggcgatggactgggcgttctgcaccgcctccagggatttctgggtatatttctgcgcgttcatattgcgtcacgctccttttataaggagaatcaggatttctcccgacccaacaggtaatctgtggagactttataatagtcagctaatgttaccagatggggcaggggtatatcccgtttcccggtttcataaatactgtaaactctttggtcgattccaagaatcgcagcgatctgcgcctgggtcatatcgtgatcctcgcgcaaatcgcgcagccggggaagatacatgttattcacctcggcgctattgtatcttactaccggataatagtattgactatactatcgaatgatagtaatataacaatatgaggtgattttatgtcattgccccggaagtacatggtggaaaagcgggtctgcgggacctgcgttcattaccgccagcactacgtccgcacggagcaggggaattattaccctctctggtacggtcattgtattcacccctggcggcggcacccggagccggacttcggctgcgagcgctgggagggaacagaaaacgggaaggagccggtcagccaaggctgaccggctcccggatatccaggtcaatcaatggcaatccggcggctctcaggaaccacggggacggccttgggcaggttcagctccagaatgccgttgttgtaagcggcggtaatggagccctcatcgatgccggtgatatcaaaggaacggctgaaggagccgtaccggcgctcccggcggatgtaggcacccttggcgtccttctgctcctggttctcgctgtgctcggcggtaatagtgaggataccgtccttcacatccagcttgatgtcgcccttgtcgaacccgggcagctcggcttctaagacaaacttgtctccggcgtcccgaatgtcggtgcggaaggcgggcaggctggcgttgctgccgcggaagaagttgcgggtaaagttatcaaaggtatcaaacaggttgtcgtcgctgcgctcaaagggaagcatgccaaacataaaaatcgctccttttctcggaaatgtgatttagcagtaggaacattgatatgctaaaacttccttagttccatccaaatcatcctctttccgggggcctttccggccccttaactcgttttctgagacaaagtataggccgagtttatgaacaaatatacatgtaaatatgtctaaattgtaaatgttagcactcttcattcaagagtgctaaaaaactaaagggactttacgggggacggaaaaagaggtataatgccccagtgtgtttcaaaaagggaggaaaaaccgtgagaaagaccaacgatctggggcgtgatccggtcttccggctggtgtgccggctggccatccccacgatgctggctcagctggtcagcgtcctatacagcattgtagaccgcatctacatcggcaatatccagggcatcggcgatctggccctggcgggggtgggggtgtgcggccccatcgtcaccctgctgtcctccttcgcctccctggtgggcctgggcggctcccccatcatggccatgcgcatgggggaggggagggacagggaggccgggcgggtgctgtccaacagcttcctgatgctgctgatactgtccggcgtgctgaccactctgttcctcctgctgaaggagcatctgctcatgtggttcggcgccagcgacgccaccttcggctacgccaacacctacctgaccatctacaccgcgggcaccttctttgccctcatggccaccggcatgaacagctttttgattgcccagggcttttccggcctgggcatggccacggtgatgctgggggcggtgctcaatatcgtcctggaccccatctttatctttgtgctccatctggacgtggccggggccgccctggccaccgtgctctcccagatggcctcctgcgccttcgtcctctgctccctgcggcggaaacggatgccggtacgcctgcggtggggcggcttctcctggcgcatcatgcggcgggtgctggccttcggcctgtcccccttcctcatcatcgccacggacagcatcctgctgatcgtgctgaacactgtgctccagcgctacggcgggccggagctgggggataccctggtgacctgcgccaccatcgtgcagagctatctgctcctcatcaccatgcccatgggcggccttaccctgggtagccagccggtggtcagcttcaactacggcgcggccaacctggagcgcatcaagagggctatccagtccatcgtggccctgtgcgtgaccttctgtgtgctcatgacggtggtgacccacaccctgtccccggtgtttgtgggcctgtttacccagaacccggaggtggcggcgcggtcggtacgctacattaaggtattcaccgccatgatcatccccctggccatccagtatcccctggtggacgagaccaccgccctgggccacgtgcggctggccctgttctgctccatcttccgcaagtgcgtgttcctggcggggctgctcctgctgcccgccctggtctccccggaggccaccttcctctccgagcccatcgccgacgtggtggccgccacagtgaccacctgcctgttcctccacttcttccccaaaatcctggcccagcgggccgcgcgggagcgggaggagcgggaagagcaaccaaaagttgcgccataattggtggaggcaaccgcccaaacaggctaaaatggggccatctggaaaggagtgtttgatatgagtttcgcgacgacaatcccacttttactggggctggtgatctgggcgggcatcctggccctggtgatttatctggcggttctgctcattaaggctctgcggaagtacctgaaatccggtcccgtccggcaggagaaggcggagatggccaggagcctgggggaggccatcaggtatcaccgtacccgctgcaagatgacccaggagttcgtggcggagtccctgggcgtgagccgtcaggcggtaagcaagtgggagagcggcgccgccgatcccagcacctccaacctgctggccctggccaagctcttcggagtttcggcggaggagctgctgaaaagcgtggaatgacctccaaaactgtgatcgcctgccccggccggggcaggcgatcttttttattggactcatcaagaggcggagcgggcgttctgtccctgctgccagtccttgttgaagcggtgttcatccactagcagtacaatgagcgcggagactacggatacgccggcaaaaatgagataggtgtagcgcaggttgccgccggtgatgttggagactacgccgttgaccacgaaggagagggcggacaccgcgccttggatggggaaaacgacggaatttaccttgctgaatccctgacggccaaacacggaggtggtaagggaggtggtgaagttggcggagccgccgatggacatgccgatcataaagatggagacatagaccagaacggtgttctcggtggcgttggccagcagggagagggcgtaccagatgccgaagaacagcatggactttttggtgccaaggcgctcatccatatagcccacgaaaaaggagccgaccaggccgatgagagctaccaggctgaggataaaggtggcctgctcccgggagaagcccagctccatgttgcgcagcaccatttgagataccacgcccagggagcagatttggaacatgccggtggtgacggccaccagccaggtttccttgcaccgcagcagtctgccggtggtccagccgccagtgggatcctcatggccgtggaagtactcggttcggtagacctcatcggacacattgtccgggttgaggccgcgctcctgcggagtattgcggacgagaagcagaccaaagatgcccagcacgatggcgcaaacggagatgggaattacaccgttgccaatgcccagccgacctaccagaagtgtgataagggggacaaaggcgacggaggccagattgtggcccatggtggtgtagcccatgacgatgccttttttcttggggaaccactgggtgaccagatccccgccggagatgtagcccgcagacatgacgccgcccaccacaatacacatgcagacggtatacatggcaagattgacggcattgcctacgccgagataggccaggccggcgacaattaggcacacgccggaggtgatgcgggcgccgatcacccggttgatctggcctacgacaataaagaagatgacgcccaccacgccggccacggtgttcatattcagtacggtaccgggaaggatgccgaacttctctgcgatggccggggcggttacattggaaccgctgttcaccatgccggcataaagccagaacatcagcagacagtacaggatggtgacccagccctgcacaccgaagtttacgaccgaggacttgttgccgtcatgtttcctgttcctcatggatgacacctccaaatcaattaagaaagggaaattcccagtaatgcttctgcgttttgatagtagagcctggcgtagtccgcctcattcagcggaatcccgcgcaaaaaggccatcatgtcctccacggactcataggggtagtcgcttgcaaagagaatgtggtccatacccagcacatcctgggtacagcggaaagcctccggcgacatattgccgctggtagtaacccagatgttgtgctgaaagtagtagcgcagcgggcggcggcagcgaatggccggattgggcagaaatttgatccggttttcaatacggtccagcaaaaagggaagcccctcgcccaggtgtcccagtaccagccggagagagggaatctcgtcgaacaggccggataccaccatgcgcagcagcgtggtgaccgtatccaccgtaaagccaagaccgggaccggcaaaggtaaagccgtagcctgcgtagcggctgccctcggggagctgagggtggagatagacgtagacgccaagttcggcggccttgcggaagaggggaagatagcggggatcgtccggtgcggtgtttccgtaattagagtgggtgtgccatgacacgaagccatattccttcacacagcgctccagctcccgctccgcagcagccacgtcctttacggggagaatggcgctgccgaacagacggccgggatgggcccgcgtcagctcatacagcgcggcattggtggcctggcaaacggctatgctcttggcgggctcaagttgctcggcgccgggggaacagctcagcaccgcatgggtaatcccctgctgctccagtagggtcaggcgctgctcgcccacgtccagaagccgttggagcagctccccttggggcatacagacatcctcagtccaatgaatttggtcagcggcgcagtcataaaacggcggctgactgcgctgcgccagcgcgtcaatgagacatggagcgtaaaagtgattttccagatcaatgcggatcaaagaaagacctcccttcgaggaataatataattgaaatagtcggtaataattattacacgatgcaagagtagcataataataatatactgtcaagtattattatattattgttgcagagaaaaaacaaaatagatgttttggacaaaaagttggcgggaaacttgtgcggaatacagaattggaggcacagtgatgcttgacaggatatttataacaggataaactagaatcgacagttaaatttgaaaggagggggagaagcatggagagcgatgtcagggaaaagattttggagacagccagatgtattttcctgaaagagggctacaaagggacaaccattaacagtatcgcccgggcggctgggatctccccgtccaccatctacctgcacttcaatgggaaaaaggatctgtttgaaaatctggacatttcggaagaagaggcgttgcaggatgcatataacgccaaccgcacctcaattcttcagacggcgctgatcctttttggggaacacggctatgacggggtatctatggatatgctggccagggagtcggggtattccaaggccacactctaccagtatttcaaggacaaagaggagctctactccgctgtcatgcaggagaccccgttttacttcaatttcctgagcattcagccggagatagacggctatgatctggaggccgccataaaaaagattggtttggcctatctggcggtttttgacacgccggagcgtatcgcctttacccgtaccattatccgggactccaagcgtcacccggaggtcagcaatatttaccataaaaatggcatcggctatgtggcccgctgtgtagagacggtgctgaagaggtataccggcaatctccaagagggggtggacacctatctggcctctaagacctatgtgggctccctgtttgggtttgcgattcagtataaaattgtggtgggagtagaaccccagtacggggatgaggagattgtagatacgctgacaaagatttttctccacgggattctgcattgaattcaaaagcaccctgacttacaggacagggcgctcgggctgaccgggaaagagcagaaggaggggaacgtatgcttgccatttggaaccgccgcgagctggtcaccgttctgaccatgcaggaacagagcgatatcttgtccgccctgcgggatgcggggttggactacacggtgaaggcgatcgaccgcagctcgccttccgccctcaatccgggtacccgggccgacttcggtaccatgggcatgtcgtcgggggcacagtacgagtacatcatctatgtgaacaagagggactacgatgccgcgcgggacgcggcggggcttcccggagacattcgctgaatcagaaacaaaaagtccggcccgtgcaaatgcacgggccggactttttggggagaagggaaggttccgcttccccacgcaaaccgctgacgctggggttgcgcgggggccccggttcagttgaaggcggtgtcgagatccttgtcgccgcccctcgtcggcgcaaagtccactctgctcgggacacccttgcgggcatccctcgctgcgctcccttgcgcctccgctccggacgcgacccgctgcgcggggctcgcgcccggttctgggtcagttggaggcagtgtccagatctttatcaccgccccagatcatgttgcggcgcagctcatcgcccaccagctccatctggtgcttcttgagctgggcgcgcttggagttgaagaaggtgcggccgttcttgttctcggcgatccacttgccggcgaaggtgccgtcctgaatgtcggagagcacggcgcgcatgcgggccttggtctcctcgtgggggatgacacgggggccggagacgtactcaccgaactcagcggtgtcggagatggagtagttcatggccgccacgccgcccttgttgatcaggtcgatgatcagcttcatctcgtggatgcactcgaagtaggcgttctctggctcatagccggcctccaccagcacctcaaagccgcagcgcatcagatccaccacgccgccgcaaagcacggtctgctcgccaaacaggtcggtctcggtctcgtcgtggaaggtggtctccatcacgccggcccgggcgccgccgatgcccgcaatgtaggctagggcgagcttataggcgttgccggtggcgttctgctccactgccacgaggcagggcacgcccttgccgttgacataggtggagcggacggtgtggccggggcccttgggggccgccatgaacacgtccacgccggcggggggaacgatctgctgatagcggatgttgaagccgtgggcaaaggccagggccttgccctcggtcaggtagggggcaatgtcattcttatagacctctgcctgcacctcgtcgttgatgagcatcattacaatgtcgccccactgggcggcctcggccacagtcttgaccgccaggccggccttctccgcctcggcccagttcttggagccggcccgcaggccgacgcacacatcgcacccggagtccttcaggttgagggcgtgggcgtggccctgggagccgtagccgatgatggcgattttcttgccgttcaggtaggagagctcgcagtccttctcgtagtacatcttagccatggtgatacactcctttttcttcttgttggtgggggaatttgaactcatgatagcatagttttcgggaaaagaatgataactgtgatacaatccgcagaagcggaaggccgccgcatggggcggaggtcagtcaagcacccgctccagctcgatctcatccccgtccgcccggccggtgggagagaagcgcagggtctggtacaaatggcaggcggccgcgttttccgggctgacggtcagccggacgaggttggaagccccgaagggcttggaacggatataggcaagcgccgcctccatagccgccctcccgcagcccctgccctggtgctgggcgtcgatcatcagatgccagatgaagtaagcctcttcatcatagtcatagatgaccatcagatatccgaccacctgaccagcgcggcagaccgcaaagggcgtacactggctgtagtatacatacgcctgggccagactacggatcgggtgggatacgaatttctcctgctgggcctctaatctcagggaaaagcacgcaagaaaattggattcatccactttttgcagggtaatatggtccatatttcctccttcatatctggagggctaatagaggaacaccctccctctggttgacaggaacatggtttcatacagcttcatacatgctctccccctttctgtggaaaatgagacacttcatatttatatgaaaacacagaggcctctgtggaatttgccggggcctatgttctgcgcaccgggaaacgggagctttacaggaagttcttgcccagattaaactcggtctgcatgtcccaaacgcgccgacgcgtttgggagcccttcgggcgggaattcacatcctcggcggaagcacccgcaaggggtacgccacatccgtagggcggcaaagccgccaacggctgtgcagtgaattgcccctgcggcaaggtttcgctgcgcgaaacgcttggacgccgcagagcggcggctcgctgcgctcgcaggaacagaccggccggagctacaggaagttcttgcccagattaaactcggtctgttccttggtctcgtcgccgatggtataggcgccccgttcgagggccaccatgccggtgcgcaccagctccaggatgccgaaggcctccagcagcttctgcatggcgtcggccttggtctcgtcgccgatcagggccagggtgagggacttgagggacacgtcgatgatcgaggcccggaagatgttggcgatctggatgatctcgttgcggatgtcgggggtctcggcccgcaccttgaacatgaccagctcccggcggatggaccgctcgggcagcagctcctgcacggagtagacggagaactgcttgcgcagctggttcatgatctgctcgatcatgggcttgtcggcccacacctcgatggtgatgcgggacacggctgggtcgtcggtggtgcccaccgccagggactcaatgttatagcccttccgggagaacagccgggagacttgggacaggacaccggcggcattttccaccaacaccgagagggtgcggcgggtcacattggcttcattcatatccacgccctcctttaatccagaataaaatcggtgaccggagcgccggcggagaccatggggtggaccatggcgtccttgtcgatggcgcactcgatgagatagggccggcccgcggccacggcccggcggaaggccgcctcgaactccggctgggtggcggcccgctccccctggatgccgtaggcctccgccagcttgacgaagtcggggccccggtccagatcggtctgggagaaccgcttctggtagatcaggttctgccactggcgcaccatacccagggtgcggttgttgaagatgacggtgatgacggggatgttgtagtgctcggcggtgcagagctcgtggcagttcatgcggaagcagccgtcgccggtgcagtgcaccaccaccttgcccggattgcccacggcggcccccatggcggcccccaggccgaagcccatggtgccgaagccgccggaggtgatgaactggccggggcgggagaagtggtagtactgggcgcaccacatctgatgctggcccacatcggtggccacgatggcgtccccgccggtgacggcctggatggtctccagaatctcgtgggggtggagaacatcgtctttcttgaggggcacctccgggtgggagaacacccacgccttccactccgggtagtcgtgctgggggagcttctcgttgagcagctccagcacccggcgggcgtcgccgatgatgtggtggtgggtgagcacgttcttgtcgatctccgcccggtcgatgtcgatgtggacgattttggcgttgggtgcgaaggtggcggggtcggtggccacccggtcggagaagcggcagccgacggcgatgagcagatcgcactggtcggaggcgagattggaggcgtgggagccgtgcataccgatcatgccggtgaacagccggtgattgccggggcaggcgccgccgcccatgatggtggaggccaccggagcgttgagccgctcgataaaggtgcggaactggggcacagctcccttggagcggatgaccccgccgcccaccagcaccaggggcttccgggccccctcaatgagatccagcagggtctgaatgtctcccgcgtcgggctcgggggtcttgagatcgtggctggcccggcggagcatggcccccagacggccgtggttggcgtgctggtcgagggggaggggctcgtagtcggcttcggcggcggtgacgttcttggcgatgtccaccagcacggggccggggcggccggagcgggcgatggcgaaggcctcccgcagcacgtcggccagggcgccggggtccttcaccagatagttgcacttggtgatgggcatggagataccggtgatgtccacctcctgaaaggagtccttgccgatgaggttctcgctgacgttgcaggtgatgaacaccacaggggaggagtcgtagtaggccgtggcgatgccggtggtcaggttggtggccccggggccggaggtggcgaagcacacccccacctttccggtggcgcgggcatagccgtcggcggcgtgggaggcgccctgctcgtgggcggtgaggatatggcggattttgtccttgtagccgtggagctcaaattcgtcgtatacgttcaggatcgtgccgccggggtagccgaagaccgtgtccaccccctgctccagaaggcactccatcaaaatctgggcggttttcattctcatgggtcgtccaacctcctttaacgataaaaacaagcatggcggcctcgtcccataggacgaagccgccatgactccgtggtaccacctaacttcgcggggcgcgcccgcgcactcattgccccgctaacggaggggaaaccgtccctgcctaacctgcggttcagcagggctgctcccgggcgagcgttcggggcggcctcatgggagcttacaccagccgctccctctctgcgcttatgtaccgcccgtactgtcccggtcatcgcctttgtacgctccgggcaagcccggaaaatgtaattacctgatatcataccgttccggaccgcatttgtcaatcgggttaatttcactttttgaacttctccattttaaacaacgaaagtggagaacggagcggagctctgttgtcatcctgacgaaaaagtaaaccggatggtttttgcaaaaatggtactgcggatgttaccatatttctggaaaaagagaaaaaactaattggtttaaaagaaaaaatgaagggaatttgagcgttttaactggacaagatgctccgtttgcgctatgataaatctgtttgagataccggtcaaacgactcagaacaatggcccgtgtgtgggtcagatttgcgaggtggacctatgaagcaaagcttttacggcggcgtgcaccccaatgaccggaaagagttggcacgccacaaggaggttgcgcccctgagcgccgctcccaagcaggtcgtcatcgccatggcaatgcatgtcggtgcgccctgtaagcccattgtagccgtgggcgatcaggtcaaggtgggccagaagatcggcgagatcgccggcctgggcgcccccattcacgcgtctgtgtccggtgtggtcaaggcggtggagccccgtccctatgtgggcggcggaaaggtgatgtcggtggtcatcgagaatgacttccaggacacctggggctccgtgctcaccccccatcccgactacagcaagctgagctgcgaggagatcgtggagattgtcaaggaggcgggcatcaccggaatgggcggcgccggcttccccacccacgtgaagattagctccggcgtcggcaaggtggataccctgatcctgaacggcgccgagtgtgagccctacataaccgctgaccaccggctgatgctggagcagggcgagcgggtcatcggcggcgtgcgcattctgatgcaggccttcggcctgaagaacgccgtcatcggtgtggaggccaacaaggaggacgccatcgagcacctgaaggcgctggtgggcggcaagaacgacgtgcaggtggagtccctgcgcacccgctacccccagggcgcggaaaagcagctcattcagcgcgtcaccggccgcgaggtgcctcccggcgggctgcccgcccatgtgggctgcgcggtgttcaatgtggggaccgccgctgccgtgtacgacgccgtggtggagggcaagcccctgacccaccgcatcctcaccgtcaccggcgacgccatcaaggagcccaaaaacctgctggtgcccctgggcacctccttccagcagatcatcgacgagggcaagggcttcaaggaggagcccgaccgcgtgctcaccggcggccccatgatgggcatcgcccagtataacctggatgtcacctgcatcaagggcaccaatgccgtgctctgcctgaccaaaaaggaggccgcccccgttgtggaggaggaggtctgcctgcgctgcggccgctgcgtcaacgtctgccccatgcacctgactccggtctacatgcacctgtacgccgagaagggcatgtggaaggaggccgaggcgcttaacgtcatggactgcattgagtgcggttcctgcaactacatctgccccgcccgcctccacctggtccagtccttccgtgtgaccaagggtgagctgcgggctctggcggccaaggaaaaagcggcgaaggaggcggccaaagcatgaacgaggaaaagaagctgagactcacggtggcgtcgtccccccacgtggcctctcccattgacaccaccaacctgatgcgggacgtgctcatcgccctggtacctgccatggtcatgggcgtggtgttcttcggcccccgtgccttggtggccaccatcatctccgtgctggcctgcgagttcttcgagtggggctaccgcaagctgatgcacaagtcctgcgccgtcaaggacctgtccgccgccgtcaccggcgtgctgctggccttcgtgtgcgcccccaccctgccctattggatgctgatcatcggcgacttcttcgccatcgtggtggtcaagcagctcttcggcggcctgggtaagaacttcatgaaccccgccctgggcggccgcgccttcctgatgctgtgctaccccgtggccatgaccacctgggtggcccccggcatcggcaccggcgcctgggccgacctgctgggcggcaccaagactatggccggggtggatatcgtcagcagcgcaacccccttgtctgctgacttcatgcacggcggcctgctgcccgatgccaccatcctcgacacatttgtgggcaatgtgggcggctgtatcggtgagatctccgccctggccctgctgctgggcggcgtgtatctgatcgtctgcggcgtcatccgcgcccgcatccccgtggcctacatcgccaccgtggcggtgctcaccttcctgttccccctgggcggcaacgaccggctggtgtggatgacctaccagctcttcaccggcggcctgttcctgggtgccttcttcatggccaccgactatgtcaccagccccgtcaccaaaaagggtgagatcatcttcggcatcggctgcggcctgctgaccgtgttcatccgctatttcggcggctatcccgagggcgtgagctactccatcctgatcatgaactgctgcgtgtggctcatcgacaaggtgggcaagcccggccgctacggagtgaccaaggaaatgaaggctgcggccaaggcggccaaaaaagccgggaaggagggctaagccatgagtgagactgcaaccaagaaaaaggaaccaggcatggcgaccctggtgatcgtcctctttgccatctgtgcggccaccgcccttctgctgggcctgaccaactatgtgaccgccccctttatcgcggctaacaacgagaagaccacccaggaggccatggctgccgtgctccccgccaacagctatgacgaggtggagtacaccggcggcgacgctatggtgcaggccgtctacaaggccggcgatgccggatacgtggtggaggttaagcccgccacgtccttcagcggcaacctgactatcatggtgggtgtggacaataccggggcctgctccggcatctccattaccagcaccggcgagacctccggcctgggctccaacgccagcaagccggacttccaggcccagttcgtgggcaagaccggcgaggtcaaggtcaccaaggacggcggcgacatcgacgccctgaccggcgctaccatcacctcccgcggcgtttgcgaggccgtcaccagcgccatcgccgccgccgcgagcatgggctaaggagggtaatcgaatatgaacgtgatgaaacaatttagggacggcctgttcttccagaaccccgtcaccgtccaactgctgggcatgtgctcggtgatggccattaccaccaccctgttcaacggcctgggcatgggcctgtccgtgttggtgattctgaccctgtccaacatcatcatcgcggccctgcgtaagatcatccccaacaacatccgcatcgcctgcttcatcgtggtcatcgccggctttgttaccatcgttgacctgtgcctgcaggcatttatcccggccctgtccaagagcttgggcctgtttatccccctgatcgtggtgaactgtatcattctgggccgcgccgagtcctttgcctacaagaatggtatcggcgcttctgcgctggacggtatcttccagggcctgggttacaccatggtgctggtcatcatgtgtgtggttcgcgagttccttggaaatggcaccattatgggcggcctgctggagatcggcgcagaaggacagttggtcttcggcctgggcactgccgcaggcatccgcatcctgcccgagggcattcccgctctgggcatgattctcccggtgggcggcttcctgaccctggcctgcgtgatcgcggccatgcagtacattctgaacaagcccaagaagggcgacaaaaagactgaggaggtggccaagtaatggagtggactcagctctttaccatcgccctgggcgccatcctggtcaataactttattgtggcccagttcctgggcatctgccccttcatgggtgtttccaaaaagatcgagactgcctccggcatggggctggcggttatcttcgtcatgggcctggcctccgccatctgttggcccatcaatgagctcattctggttcccatgggcctgaccttcatgcagaccgtgacctacatcctggtcatcgcctctctggtgcagttcatcgagatgttcctcaagaaggccatgccctccctctatgaggccctgggtgtgtacctgcccctgatcaccaccaactgcgctgtgctgggcgtggtgctgcagaacacccagaacggctacggctttattgagagcgtcgtgtacggcgtcaccggcggcatcggcttcctgctggtcatcgtgatcttcgccagcatccgggagcggatggagttctccgagtggcccaaggctttcgagggcttcccgatcgccctggtggccgccggcctcatcgctctggctttcatgggcttctccggcctgaaggtcttcggttaaggagggcggaagaatatgacgactgttatgattgccgttgtggtcctggctgtgctgggcgccatcttcggcctggtcctggcgatcgcctccaaggtgttcgctgttgaggtggatccccgtgaagaggccatcctgggctgcctgcccggtgccaactgcggcggctgcggctatcccggctgctccggctatgcctccgctgtggtcaagggagtggccccagtcaatgcctgcgccgccggcggcgaggcggtggccgcccagatcggcgagattatgggcgtgtccgctggcgccgcagtgaagcagattgcccaggtgcactgcaccggctgcggccagaactacaagcagtacacttacgtgggcatccacgactgcgtggcggcctccaagctgcccggcggcggcgacctgggctgcgcctatggctgcctgggcctgggctcctgtgagaaggcatgtccctttgacgctatccacgtcatcgacggcgtggccagggtcgatgaggagaagtgcaaggcgtgcaataagtgcgtggacatctgcccccgccacatcatcgccctggagccctacaagaccaagcgccacgtcaccattccctgttcctcccacgacaagggcgtggacgcccgcaaggtatgcgacaatggctgtatcggttgctccctgtgtgctaagagctgccccaaggaagccatcaccatggtcaacaacctggcggtgatcgactacgagaagtgcatcggctgcggtatctgcgcacagaagtgcccccgcaagctgatcaccgtggacggcaaggtgcccgaggtgaagcctgcggcccccaaggccgccccggctgccgctgtcaagcccgcggctccagctgcggagaagcctgcagcggaggccgctgccgcccctaaggccgaggcgcctgccgagcccaaggagtaaataccataaaaatcgcgcgttcccgatcgggaacgcgcgattttgcatggatggacggttcagcgcttgcagcagccgccgtggtcgcccagctggaaggaggcgcactcggtggaggcgcagttggtcacgttggagtcgcagcaacccaccttgatctcgttcagggtgcagtagttctgctcgccgcagtggtaagcacaactgttcacagagcacttgatgctgttgttgggggtcttgttcatggtgagattcctccttgattccttggtatgacgcaagggaagcaccggcccgccctgcgtgacagggtgggagcagtgcttccctagtatgcgcccctgagggcggaatattcggttattttttggcgccggactccggaaggaccttggggatgaaacgcttggcgaaccagcccttgccgcggttctttacatagaaatagccgataaaggagaacaccaccgcgccgataaagttgacgaagaggtctttcatggtgtccaggatgccgatatccagataaccgcccaggcccagtgggtgctgggctccatcagccgtgaccacaatcacgtcggtgatgtcgtggatggccaccggggtgttgccgccggcggggtccagcatcacggagccgatggagtgtacgatcgtgtccttctgcatgtccagcaggaacatctggtccataaagcactcgaagaactcccacagcacgccgattgtcatggagaagcagaaggccaccaccgccagatagaccggggagagcttgaaggccagacgctcgtcccggttcaaaatgtccagcagggagaagccgatggccgcgcagagaaagccgttgagggtatggagcatggtgtcccaatagggaaactggacatagtaagcctggatctcccccagaatttccgccgcaaagatgaacaggaggatgatgatctccagggtgtccgggatatcaatgcggattgtgcgctcgatgaagctggggatggtaaacaggatcagggtgagcacgcataagaacacgttttcaaagttcccgttaaacacctgtgccaccagggccagcaccaccagcacccgtaaaatgacgtagaccgcggccagccgggggttctcacgcacctgttccttcaatgttttatgataacggccgggaattttccctttccttttcatacgcttcctcctgtttcggacgcctcggcggtggggagcagctcggcggacagagtgcggtaggtctcggccgactggagcagttcggcggcctcctccggccggagggagcgcaccaccctggccggggaacccaccaccaggctgccgggcggaatcacagctccctgggtgaccagcgccccggcggccaccaggctgcccgcgccgatggtgcagccgttgagcaggatggctcccatgccgatcaggcaggtgtcctccactgaacagccgtggagaatggcaccgtgccccacggtcacgtcgcggccaatcacggccgggcagtctgcgtcacagtggagcactgcgttgtcctggatgttggagcccgctcccacgtggatggaactctcatccccccggagcacagccccgtaccagatgctggaggcggcctccaccgtcacgcagcccaccagggtggcgttggcggccagccgggcggcagggtggatgatgggcgaatgcccgcgaaagcgctgtatcatgtctgctggttcctctccctttctacagtgatatctatcattatagcgcctgtccccggcggtggcaagtcaaatctcccgccggcccggcataggatagctgggaggtgaagccaatggacttgaagcgcaatcagatcacggtgggggagctgctggaccacccgggggcccgggcggtgtttcagcgccgtttccccatgctgatgaagcaccccatgctgggagcggcccgcaccatcaccctggagcagattttgtctgtggcccaggcatacgtaccgcagaagaagatcgacgagactctcagtgaactccgccgggcgtagatgcaaaaagggcgggagcggcacttggccgcccccgccctgctttatgccggccggcggcggggcaggcgggcataccagcgcagggaattggggtctccggtccggcgcaggagccgggcggtgaggagcgtgtccagcgccgtggccagcacggctggagggaatgcccacagcggaatccgcgccgccagccaggccgccgccggatgaatcacatggaggacgagcagggccagtaccccccagaacagggcgaacagaaggcatacccgtccgcccagattgaggggcaggtgggagtaatcccaaaaggatacccgaaagaccttttcataaaacagcccggtcacatactccaccgccgtgcacaccagggcggcggcggggaagagaaggggcaggctgtcccggaccagaggcggcaggaggagaatggccaatgcccccaggccgtacaccgggcagatggggagcaccagccggcacttccggtcccgtttgactccacccaccaggcggacataggccacctccaccagaaagccgagaaaactgtaaatcagaaagtaccaaaaccacaccataaaaccgccccgcttcgtccgtttttcatagcatgaggcgaagcgggagagatcatgtgatgcagtttttaacagggcggggggactgacaaggcggaggagaaaaaagtgtaaaaatttgtccgttctgctcttgcccgggccgggggaaatatgatacgatagaaaaaattcaaaaggggaaatgaagcgtcatgcggcatctgatcgactttggagacctgacgagggcggagtgggagtccctgtaccagcggtgcagtgatattatggaccaccccgccgattttatggacgcctgccgtgggcgggtgatggccagcctgttctatgagccgtccacccgcaccaacttttccttccagaccgccatgctgcgggtggggggcacggtgttcggcttcgccgacccaaagtccacctccaccgccaagggcgagaccctgaaggacaccatcaagatggtgtcgggctatgccgacgtggtggtgatgcgcaaccccaaggagggcgcggccaaggcggcctccctgtactccgacgtgccggtgatcaacgccggcgacggcggccacatgcaccccacccagaccactgcggatctcaccaccatcacccgcctgcggggcaaggtggacgggctgtccgtgggcctgtgcggcgatttgaagaacggccgcacggttcactccctcatcaaggccctggccaagtttgagggcatcaagtttttcctcatcgccccccgtgagctggcggtgcccgagtacatgcgggcctttatgcgggagcatggcatgtggttcaccgaggtcaccggcctggaggccgtcatccctcagttggatgtgctctacatgacccgcatccagcgggagcgcttcgtagaccccctggagtacgagcgctgcaagggcgtctacgtcctcacccggcggaagctggaccgggcgaagaaggaactgctggtcatgcaccccctgccccgggtggatgaaattgccatcgacgtggacgacgatccccgggcggtctacttcgagcaggcccgctacggaatgtacgcccgcatggccctgctcaccgatctggccaaccaggagcgggaaaaaccggagccggtggaaatcggcgtcaagccggtgtgctccaaccccaactgcatcacccagaccgagcactacctgcctcccctggtgaagcagaacggcggcgtggactgctgcgcctactgcgacaaggagctgcggtaaaggggggaacaacctccgccggacacggggatatcgcgttttgccttgacttttttcccgattttgcatatactaaatgcgatacacagcgacgaagggaaggagtacccgcgcgggcggtgcagagaggggccggatggtgcaaggccctccggcggcgcggggaaggtcgtcccggagctccgggcctgaatacagtagggcccggcgggttctcccgttagcgagacaagagcgcctccatggcttcatgggggaattcaggtggtaccgcggacttacgggttcgccctgagcaacaggcttggggcgggcccttttgctttgccccgaaaaggagtgtaacagatgaaaaaagaactgcccaaggtctatgaaccccgggaggtggagggccgcgtctatgagatgtgggagaagaacggctgctttgagggccgccgcgacccggacaagcgccccttcaccatcgtcatgccgccccccaacgtcaccggccagctccacatgggccacgccatggactgtaccctccaggacatcctgatccgcttcaagcggatgcagggctatgccgccctgtgggtgcccggcaccgaccacgccggcatcgccacccagatcaaggtggaggaggagctgcgcaagagcgagggcctgacccgttacgatctgggccgggagaagttcctggagcgtgtgtgggactggaagcacaagttcggcaaccgcatcgtggagcagcagaagaagctgggcgcctcctgtgactggagccgcgcccggttcaccatggacgagggcctgtccaacgcggtgcgccatgtgtttgtgtccctctacaacaagggcctcatctacaagggcagccgcatcatcaactggtgcccccactgcgtcaccgccctgagcgacgcggaggtggagtacaaggagaagcccggccacctgtggcacatccgctaccccatcgccggggaggagggccgctatgtgaccgtggccaccacccggccggagaccatgctgggcgacaccggcgtggcggtcaaccccgaggacggccgttaccgggacattgtggggaagaagtgcatcctgcccctggtgaacaaggagatccccatcgtggccgacgcctatgtggacatggagttcggcaccggctgcgtgaagatgacccccgcccacgaccccaacgactttgaggtgggcctgcgccacaacctggagtccatccgcgtgctggacgacaacggcaaggtggtggagggctacggccgctactccggcatggaccgctacgaggcccgcaaggccatcgtggccgatctggaggagcagggctacctggtgaaggtggaggagcacacccacaatgtgggcacctgctaccgctgcggcaccgacgtggagcccatcatctccgcccagtggttcgtgaagatggagcctctggcccgcgaggccctgcgggtggtcaacgacggggaggtcaagttcgtccccgaccgcttctccaagatctacaccaactggatggagaacgtccacgactggtgcatctcccgccagctctggtggggccaccgcatccccgcctggacgtgcgaggactgcggcgagatgaccgtcagcgagaccgatcccaccgagtgccagcactgccactccacccacatccgccaggaggaggatgtgctggacacctggttctcctccgccctgtggcccttctccaccctgggctggcccgacgagagcagcgaggacttcaagtacttctatcccaccgatgtgctggtcaccggctacgacatcatcttcttctgggtggcccggatgatcttctccgcctgcgagcacaccggaaagccccccttccacaccgtgttcatccacggcctggtgcgggacgacaagggccgcaagatgtccaagagcctgggcaacggcatcgaccccctggagatggccgaccagtacggcgccgacgccctgcgcttcaacctgatcaccggcaactcccccggaaacgacatgcgcttctacaccgaacggtgcgaggccatgcgcaactttgccaacaagatctggaacgccagccgcttcctgatgatgaacctggccatcgaccggtgtgagctgcccgaccggctggagctggaggacaagtggatcctatccaagctcaactccgtcatccccgaggtcacggagaacatggagcgctacgagctgggcgtggccgcccagaaggtgtacgacttcatctgggactcctactgcgactggtatatcgagctgaccaagacccgcctccagggggaggacgaggacagcaagctccgggcccagcaggtactctgctacgtgctcaccgagaccctcaagctgctccaccccttcatgccctttatcaccgaggagatctggcaggccctgccccacagcggcgattacctgatgctccagcagtggccgcagcaccgggccgagctggacttcccggaggaggagaaggccatggagctgatcatggacgccatccggggcgtgcgcgcccgccgcgccgagatgaacgtgcccccctccaaaaaggcgcagctcaccgtctccaccctggagcgggccgtctttgagcaggggattcccttcctcaagcgcctggcctacgccagcgatgtgaccgtggagggcgtggccgacgcgggcagcgacgacgccatgaccgcccagggcatggtcaccgtcaccacccacgccgcccggctgttcatgcccctggccgagctggtggatctggagaaggagaaggcccgcattgagaaggagctcaagaagaaccgggccgagctggacaagctggaggccaagctgggcaaccccggctttgtcaacaaggcccccgcccacgtggtggaggccgagcaggaccgggctgaaaagctccgggccctcctggccaaactggaggaatccgccgcttccatggcgtaaacaggataaaaacggagaaatgccgccgccctcttcggcaggcggcattttccgcgcgtttttgttgctttttgtaacacatctgtagttgtagaatgagtccccagcggatagaatagatcaaacacaggataaaaacggaaggggggccaagctccatgaaaaaactcatgccgttgctggctcttgtcatactgctgtcgggctgctgggggtgcgttccggccagccctgcggagagcagcggcacggcagaccggcccacgcctccggctacccagaccatcctggacagccccattccttcggcggaggcgagcacacccctgcgtacgcccgcccccacgccggaggaggcggagcccgtccccacacccgtcccacctccgaccccgaccccggctccaacctccacccccgcgtccgggggggatgagcctgcggacgaggccatcctggcggcctacgagaaggcggaggaggcctggggctggttcgagattgcgcccatgccgctggaccgtgacgaccagagaaccgtgggggagcaggtctactgccgggtggactacccgggcattaaaaccctggcggatctgcggggttatttgaaaagcctgttttccgacgggctggtggaggagctgctccccgtggacgggacgcagtatgtggagctggacggtgcgctctacaccatcgacggcggccgcggcgcggacatcaccaagggcgaagagaccgtccaggtactccgggacggtacgcccggccggtgcaccgttcgggtgacggtggaggtgctggacccgcagcagggattttccgtggtggggagcgagacccacgatttcctctacgagcaggtgggggagcggtggatttttaccaccttttcaatggtgcgataagggatcgacgcaaatcgcataccggctgtgctatgatcgcagtataccagattttggtatactgcgtttttttgtgtcaacaaggagggacaagctatggcagtgacctgtaccggcgaggggcgggtgctccgggccgccatcagcggcgaggtggaccaccaccgggcgagggccatcatggaggagctgagccgccagatcgacctggagctgccccggtcgctcaccctggatctggagggcgtgacctttatggacagctcgggtatcgcggtgctgctgcgggcctaccgccgcctgggggagctgggcggcgcggtcaaggtggtccatgtccccgcccaggcgggcaaggtgctccgggcggcagggctggacaagctcatggaatttgaatgacgggaggtttacataagatgaaacccatcaatgaggccgcggtgacctttctgagccgctcggccaacgagggctttgcccgcacggcggcggcctgcttcgcggcccaactggaccccaccctggacgaggtgaacgacatcaagaccgccgtcagcgaggcggtgaccaactgtatcgtacacgcctaccccgaccggctgggcaaggtgtccatgcgactgcggctgtttgaggataacaccctggagatccaggtcaaggactggggtgtgggcattgccgacgtggagcaggcccgccagcccctctacaccaccggaaccgaggagcgcagcggcatgggctttaccattatggagagctttatggacgccgtgaaggtgcgttccacccccggcaagggcaccgtggtcaccctgcggcgcagggtctcccgccggatgggggcgcccgtgtgagcgtagcggatacacccgccctgctggaggaggcccgccggggggacaacgacgcctgtgcccggctgatcgaggagaacgccggactgatctggagcatcgtccgccgctactacggccggggaaccgacccggaggatctgtaccagctcgggtgcctgggatttctgaaggcggtgcggggctttgaccccgccttcggctgccagttctccacctacgccgtgcccaagattgccggggagatccgccgcttcctccgggacgacggggcggtgaaggtgagccggggactgaaggagcgggcgggggccatccgctccgcccgggagcgcctgtccgcccgcctgggccgggagcccgccctctccgagctggcggaggagaccggactggagccggaggagatcgccgccgccgaggaggcaaacctcccagtggcctccctccagatggagacgggggacggcttcaccctggagagcgtgctgggcaccgagggcatggaggaggccatcgtggagcgggaggccctgcggggagcggtggccgccctgcccgagcgggaacggcaggtcatcctgctgcgctacttccggggtatgacccaggatcggaccgccaaggtgctgggagtctcccaggtgcaggtctcccgcatcgaacgcaaggccgtggagcacctgcgccgcaagctggagtaggggcggcctatcttgcccctttggcgtaatttgccctagcccatcggcttgcacttccgcaaccctgtaggggcggcctttatggccgcccgcgggcgaccacaagggtcgcccctacgccgtgatacgttgaggcgggcgtccccctagcgtaggggccgacgccccagggcggtcttccttgcccctttggcgtaatttacccctagcccatcggcctgcgcttccgcaaccctgtagaggcggcctttatggccgcccgcgggcgaccaccagggtcgcccctacgccgtgatacgttgaggcgggcgtccccctagcgtaggggccgccgccccagggcggcctctcttgcccctctagggcaattcaccttctgcccacatcggcccgtcttgtgccgggctgacgcacctttcatgttgcagtttttgacaactgctttcttgtcatgcctccggcggggcctacgctgtcgcgccatactggagtgtcatccactacggctccgtatcccagaagcggccaaggccgcccagctccaggcccaactggaggcccagacaaaaggcggcgtcgcgctcccaggccgcagccagattgcagcggtcaagcaaatccagcacctcctcgttcaaagcctccgggtgggaggctttgaacgccgcccactgtgcacggctgtcccgctctgcctcctgataaggcgtgcagtgggacagcttttcctttagcagaagaagcccggcccagttcaggataggaaagaaagaattcatatcagcaccttctaaatagcttatagctatattatagcaaagtaagaaaaaagtcaatagctaaaagctatagatgaaaaagatattgctattagctataataggagcaaggagtgattggaatggattaccgaactctgataagggaaaagagaaaagaaaagggactgagtcaggaaaggcttgcaaagctggtacaggtgtcccagcccttcattgccgaaattgagagtggccggaaaaagccctcagtggatgtgctgatgcgcatttgtgcggtgctggatatttccctgtttggcaacggggaaccataaggtggcttttctcgtccaaagagggtataatggcagataccaaaaccaaagacaaggaagtggagaccggatggcagatattctgtatatcgtcgtcccctgctataacgaggaagaggtgcttcccgagacctcccggcggctgcgggccaagctggaagggctgatggcggcgggcaaaatctcggagcggagccgggtgctgtttgtcaacgacggctccagggaccggacgtgggagctcatcacccggctgcatggcgggtgccccctgttctgcggggcggatctctcccgcaaccgggggcaccagaatgccctgctggcggggctgatgacggcgaaggagcggtgcgacatggccatctccatggacgccgacctccaggacgacattgacgcggtggacgccatggtggagcagtactacgccgggtgcgatgtggtctacggcgtgcgctcctcccggaaaaaggacaccttcttcaagcgcttcaccgccgagggcttctaccgggtgatgaatttcatgggggcggagacggtgttcaaccacgccgactaccgcctcatgtcccggcgggcgctggaggggctggcccagttcagggaggtcaacctgttcctgcggggcatcgtgcccatgatcggctaccgcaccggcaccgtggagtacgagcggggggagcggttcgccggcgagagcaaataccccctgaaaaagatgctctccttcgccatggagggcatcacatccctgtccgtcaagcccatccgctacattaccggcctgggcttcctcatctttgccgtcagcatcctcatgctgatctactccatcgtccgctgggccacgggagccaccatcatcggctgggccagcgtgatctgctcggtgtgggccatcggcggactgatcctcctctccctgggggtcatcggggagtacatcgggaagatctatctggagaccaagggacgcccccgtttcctgctccgcgaggtactggaggatgcgcatggcgaaaaagctgattgacaagagcatccccaggttcctgatggtgggagtgcttaacaccctggtgggggcgggcgttatgttcctgctgttcaacctggcgggctgggcctactggacagcctcggcggcgaattacgtggtgggcggtgtgctgagctacttcctcaacaagcactttacctttcagaataaggagcgcggctgggcccaggtgggcagattcgccctgacggtagcggtgtgctggctcattgcctacggcgtggccaagcctctggcgctgtgggccctctccgggcagagcgggaagatccaggagaatgtggccctgctggtgggcatggtgctttacaccggtctgaattacttcggacagcggttttttgcattccgtaagaagaattcgtaaggcggggatgccccgccgctggaaaaggaggttttcatgaaacggttcctgtcaatcctactggccctggcgctggcactcaccctgggcattcccgccctggcggcggagcaccaggccggggacacctacatccgcatcctgggcagcagcggcgcgcggacggtgggcgtccgcaccacctacggagcgtatcggcagacggcagacggcgcggtgtaccgggacgaccggtatgagtttgtctacaccgacgacggggtgagctggctctccgccggggcggcggagagcagcctgggcagcggcatgtacgacgggacgcagttcctggccggccccttcgggagcgagcggcccacttggcgctccgccgacggggggcactggacggccctcacgccggaggagcaggataccgcgccggccatccagcggggccggtcgtcgctgaacggcctcaccttcaccctgcggggcggccgggagctctgggtgacggacggacaggggcgggccgtggagctgacggcggacttcacctccttcctggccagctacgacatggcggatgtgcaggcctatccggtgccccagggcatccgggtggaggtctacagccggtatggctacgagaccggcgcgtcccacacctatccggcggcggagttgaagcagcgcctggccgctgcccagcccgagctgctgcgggtcacggtagacggcaagccggtgactttccccatctccctctatcaggtgagcggctgcacgatggcccctctgcggcagatggcccaggctcttggctatacctttgactatgacggctcttccgggacggcggtatgcgcccgggggacggacaccatttctgtgcgcgcggccagcacccaggctaccgtcaacggcaagaccaccaactggctggcggtgcccgccgagctgcgcggtggcatattctgtgtacccgtccgattctttgccgaggcggcgggggcggatgtgacctgggatgcggcggggcagaccttctacctcaccacagcaattcaggaggggtaaacatgagacggcgtgcaatttcggcgctggctgccgccctggcgttggttctcaccctagtcactcccgcgctggcggcggggcggcccaattgggacggccccctgggggccatggcgggcccggtggtgtgcgagaccggaagggactatgtgctgtactacaccatcataggcggcgtgtaccgctccgcagatggggtgacgtggacggagctggatcgccagtgggcgagtgcgggctgggcctacggcaccggtgtaaacggactggctcacaaggagttccagtttctgtggacgggcagtgagtacatgatgcgccagagtctgctggacgatccccgggaggacacccaccagcaatatggggacagtccccgcaacaactgggtcacccttttggacgaggacttccgcatcatcggcgccaaggcgtttgacggcccggtcaccgatatccggtacgcggggggcacctactacgccaccgtggacggggtggagcacgccttcacccggaccgactgggagccgggccgggagggcggcgtctactacagcggcacggcctggtacaagcaggagaatcagcgtaagcccgtggaggtgaccagctatcttatccgggagcagcccggaaacaacggcccctttgggctggcggtctccacagacggctactcctggctgccgctggagaccaagctgaccccggacatgatgcgcctgtccgagaccgggggaggagccgtggtctactacagcctgtacgacggttcgctgtactactatgactacaggggcagccgttttgcaggggcctgtaccgccggatgggtggaggccgacctgggctttgaccccgccgagggcgttggaacggcctgggtggactataccttccgctggacaggggacggctatcttatgtgtcagtctgtcaccggccgggggatgatgggtaccggcgcagaccggttcagcccgaacaacaacaaggtcattttcttggatcgcagcttccaccggacgggggagcacgacttcggcgcaccggtggagaacgtggcctgtgtggacggggtgtgctatgcgctggtggacggaaccgtctggcaaagcgctgaccgggagcaatggacggccaccagcctgaccgtcctgccggaggcggccccccagatagatctgggatggcgcatcaaggattgcccggtggacggccagaccgacggttcgctggtctaccgggtggcggatgggaagctgctggcctccggcgacggggtgtatttcacggccctgtgtccctggagctccacgggggtggaactccattcagggggcggcacggtggtaactggtgtggggacggatgacgttctggcagtggactcggaggaggtccgggggctctgcgccgcatgcttcggcgagtttcccacctatgtggctctggacgggggatatttctccctgaccgatatgcccctgcgcagcacagcagggtgcaccatggccccgatgcgggaactggcggtctggatgggatattatgacttctcctacgatgcggccaccgggacggcggtgtgcagcaacggggcggagagcatcaccgtccgggtgggcatcacccagggccaggtgtccgggcgcggcccggtctccatggcggtgccgcctgagctggtggggtggaagctctatgtcccggtgcgctttatggtggacgccgcggggctggaggacgtgtgggacgcggaggaaaacaccctctggattaccacccccgaacagacgtaaaaaagggcctccctcaggcgggaggccccttttcaaccgggggttcggcggcggacactacaacggcgcaggcgaggtcgcccgctacgttgacggcggtgcgcgccatgtccagcacccggtcgatgcccaggaccaatgccaccccctccaccggcaggcccacggactggagcaccatgcccagcatgacggcccctgcgccgggtactccggcggttccgacggaggccagggtgcaggtgaggatgatggtgagctgctgggggagcgccagggggataccgtaggcattggcgatgaacagggcgcacaccccctggtagatggcggtgccgtccatgttgagggtggcacccagggggaggacgaaggagcgcaccccggcggggacgcccaggcgctcggcggcctccagcgagaagggaagggccccggcggagctggccgacgagaaggcgaagaccacggcgggcagggcctcccggaagaaacgccgggggctgcgccttgccagggcgcccacggctcctccgtagatcaacagaagctgcaccagacaggccccgtagaccaggacggccacccccaggagggaggagagcactctgggcccctctgcggccaccaccggggcgatcagggcgaatacggccaccggcgccagtaccatgatccgctctgtgagggcgtacatagcctccgccagactgccgaaggcccgcagcaggggcgcacccttctctccgatggtcagggacgcccacccgagggccagggcaaaaaagaggatctgcagcatattgccctcggccagagcctggatggggttggtggggacaatccctagcagggtgtccgccagagagaaagagggggcctcctcccgggcggcggggagcggataacccagctcccgccccaccggaaacaggttggccgccagcaggcccagggccaccgccagcgcggtggtgcacaggtagaacaggagggtgcggccgccgacccggcccatgtgccgggcgtcccccagaccgcccacccccgccgtcagggagcagaacaccaggggaaccaccagcatctttaccagattgagaaacagggtgccgaagggctgaatccaggccgcggcaaactccggggcattctggagcgccagccctgccagcacgcccagccccaggcccagcaggatccggagcgaaaggggcagcttgcgtctcatgctccacctccattccccactaggatatggaggcgggggaaaaaccatacggaggaacggccatggagtacattcccgccaagcagatcttaagccgcaacaggaacaccgcctggttcggcaccgactacaccatgaacctgtaccggggctgttgccacggctgcatctactgcgacagccgcagcgcctgctacggcatcgaggatttcggccgggtgcgggccaaggagaacgccctggcgctcctgcgggacgagctgcggcggaaggtgcgccccggcattgtgggcatgggctccatgagcgacccttacaaccccttcgagggggagctccagctcacccgccacgccctggagctgctggacgcctacggcttcggggcggccatcgccaccaagggagacgggattacccgggacatagacgtgctgcgctgcatgagggagcacgtgccggtgctgtgcaaggtgaccgtcaccaccaccgatgccgccctagccgcccgggtggagccgaacgctcccagccccgcccggcggctggaggcggtggcccggctggcggaggcggggttgtttgccggcgtgctgctcatgccggttctcccctttttggaggacaatgtggaaaacgtgcgggccgtggtggaggccgcggcggaggcgggggcccggtttgtctaccccgcgttcggtatgacgctccgtgatcaacagcgggaatattactatcaggcattggaaaaaggctttcccggcctggcagagcgctaccagcggcagtacggaccccgctacgagtgccccagcccacgggcaaaggctctgtggatcgccctggaggagcggtgccgcgccttgggcctgctgtgccggatgcgggacatcaccgctgcctatcagcgcggctacggggagcggcagctcacctttttctaaggctgcggctcaatgtccatggacgccatctgttccggcgtacagccgttggcggcgcccatctgcgcccagtagcgtgtggaggcccgcacaaaggcgcggggggacaggggcatggtgaccgccagctcggtggactgtccggcggcgatggccctggccagggccctgatgctccgcctgacgaggaaggcgaagggggtgcccaggatggcctccccgccgccgattttgaggcatgcgccgaagggatagccgttctccagacagaaaaggcgcaccatgtccaccgcgacatcgttctggtgtggctccagaaagccgcagttgatcagcacgctgatgcgcggcctgtgctccggcccggccccctccaggaactccaaaaagcgcaggagaggggcgggaaggccgtcggcatagagggggaagaccagcagcaggtcggtgcactccgccgcggccgctgccagctcggcgtgattctttgcggtcagggccgcatagcgggcctcccccttccagcgggcctggaacagctcggcatagcgcctggaattggagcggggggcgcgggggctgccgtttacgatcaaaagctttaccaccgggccacctcctctcccacagcggcctccagctccccctcgaccacaaagcggacgcggtggctgcggaaggacatgttgtgggcgttgcgctccaccagccgggtgaacagggcgcgctcctccgcccgctccgccccgtaggccaggatcaccgcgtccttggggaccacggcgcgctgaacatggtgagtctcgccgttgtggatgcggagaaaggcctgctgcaccggaatggcccgctccagcatggtcttcatcaccggcgcgtaggagccgtatttgacccggctgacatagagtacctgctcgctccgggcgatgaggggatatacccgtgccgcgtcgtcccggatcacgcagcggccgggcgttttggtccagcagccgaagcagcccacgcagtttgcgatgcggagggcggagagatccacggcggcggcatcctgggggagagcggcggacacgggacggtccgtcatcaacagtttcatgggtgctcctttccgggggagaattcccccagtgaaatgatatgattttatcacagtgcgggccaaagggcaagaaaaggccgcaaaatttaagctccgctataggatcggttaaaattggctaaaatcccggcgcgtccccttgcgcaccggggcaaaacggggtagaataaggccagcaacccaacaagccgcaccgtaaggaggtttttaatatggcttttttggatgaactgaaggatcgtgcaatggatctgggccgggccggcgtggccaagtccaagcagcttgcggagatcaccaagctgtccctgaacaacgccagcgaggaggacgccatcaagaaggcgtatgtggagatcggcaagctgtactatgccgagcgaggcatggcccctgaggcggcctacgtggccctgtgcgaacgcatcaccgccgccaaggtcaacattgaggagaacaagaaccgcatcgccgagctgaaggccgagggcaatgtgtccgacgcggacatcccccacgtggagaccgacgtgccccctgaggagccggtggacggcggctgcggctgctgcgaccacgaggtggctcccgaggaggtattctccgacgacgacaagccccaggaataagcatctgacccgacagggcccgccatccggcgggccctgttcctgtgagtggaccgcgttgactctgatgcggtgtacggcgattgacggcgctgatgcggcacagggcggggagcgtggggcagggcgatgggaaggccggcgagggattccggcagctccggcgcgccgggagacagaacttggtttcctccagaaaggccagatccatttgaaaatccctcctaaaactgcatcgtatacgaaaacataaaacgagcgtgcacggcagagccgtgtacgctcgttttcaactcagaccggattcgcctgccaggcaaaatcacaggatgcggcgggcgcccacgtagacgttggcgtagtggccgcgggtaagatcgtcaatcttgacggtgtatgtattggtggaggcgtggatgaactgcccgccgccgatatagatgcccacatgagaggcggccttgctggtgttgtacttgaagaacaccaggtcgccgggctgcagctcgctcttggagacggaggtgccgttggagagctgagtggaggcggtgcggttcagggtgtagccgaaatggcggtacacatagctggtatacccggagcagtcaaagctgctggggccgttgccgccgtacacataggggcaaccgaggtactgcttggcgtagtccaccacctgctggcccaggctgctgctggaggcggtggccacagcggtggcgccgtcgccgcgggagccggcggagtccttgcaggtgaccatgtaatcgctgctgacatagccggtgacgccattggtagaaatcttgtaccagccgttgtcgatgcccacgatgttgaccaccgcgccgttgttgagggaggtgaccttaccgtagctggtgccggggccgctgcgcacattcaggggagaaccctgggactggaccaggccgtaaccgatggtgacatccgccttggcggacacgttcaggtactcgccggacatatagccctccacggacttgtagtccaccttataccagccgttgccagcgtcctccagaaccaccacggtgtcgcccttggaggcggtacccagtacggtggcggaggtgctggcctcgtcgcggaggcggagagcgtcggtgttgacggtgcccacgccgacactggcggcggaggcgctcaccacgcagacggtggagaggacggcggttacaagcgcggtgcgcaggagcttggcaggctgtatcatgggtcgattcctccagtttcaaagtaatacccgcccggagggcggggctttggcttctcgggtgtaaggcggggttacgggttggcgagcgcgcgctccagccagacggacgccacgtccatggcggcgtagaggctgtctttctcagttttcttaaccacccggtcccggctcttcagatccgggtcggtgagctgaagctgaacggaaaccttggtcgccacgtccaggtcctgatccttcttctgggagagaatctggagcatgatgatatatttctgggccatgctgccgtagtagatcaggctgtccttccggcggagggggtggcccttgtaggtcaggggaatattctgagctgccattttgacctcctttgagaattgtaactattcttaaaaactgtaaccaaattgtaacacattgtttccagctcgtcaactgctttcctgctgatttcacaggaaatttgtaccggcatgccagatggtaggggacagactgttactctctggatttttgagggaaggcgagccggcgggcgagggagaggaccgcaaaggccaggccggccagcatgagcagggcctcgcacagcatggggaacaggcggccatccagggagaccgccagggtaaatttcccccgcaggaccaccacataggcgcccagggaggccagctccaccagcagggcgcagggggcggagcgggggaacgcgcaggcccaggccagagccagcacgtcagccaggaagaagtagcgctcatgcatgtggggcagcaggaagggtacgccgatggccaggacaaccgcggcggccagaagagcccggtcgtccgcctggcggcgaaaaaccagcagggcggccagcacggccgcagcgagggcgaaggcggccaggatgcccaggcgggcggcgagggcagtgttcacctccgcgccgtggggaatcagggcgtacatattgggggcgttcaggttcagatagccggagtactcggcggcctgcccaaaatagacccccaggatgtcccccaggggcttgcccagcagcagcgcgggcacacaggtggcggcataggccgccggaaaccacaacagctcccggaagcgcacccgccggagcagccacagcccgccccacagggggagcacaaagacggtctgtagtttaaaggagaaggcgatccccagcaggagcaaagagcttcggtttcttccctccagtgcgcaggccagggcgtggagggtgagggcgccgtacagggcgtcgcactgcccccagaacgcgccgttgagtatcaccgtaggcagcagaagaagcaggcagaagcagagcagggggcggttcgggcgctccggcgcgaaatgccgcaccagccggaagccgccccaggccagcaccacgtcaaacagaatggagaagagcttgatgaggtacaggtcgggtatgggcagataggagatggcggcaagaaaatagaggtagggcgcgttatagttgccgatcggcagcttcacggccgcgaagccgcccccatcccggaaggccgcggcccattgggagaggaacatctggtaatcggcggactggtagtccagcagcagggcccggaggaagaaggccagcccaatgggcagcagggcgtccagcagccggggacggtccaggccctcccggcggagcagccgcagcgccagggcggccagggccagcaggagcagaaagacggccagatgagcgggcgctccgcccagggcaagggagccggcgggaaacaggctcaggcccagcagggccagtcccgctgcggcccaggagagggaaaagacgttcataggcacctcctgtcgaaaaaaggcccggggcaatggggtgccccgggcctttcacagtgggatcagacttcagcggactcggagaggaccgccgcctcggcgggggcctcttcctcgggaaccgcctcctcgccgctctgggcggtgccctcgtcgtccaccttgtcgtacttgcggtagacggacaggccggagccggcgggaatcagcttgccgatgatgacgttctccttcaggcccagcaggtggtccaccttgccctgaatagcggcctcggtgagcaccttggtggtctcctggaaggaggcggcggacaggaaggagtcggtggccagagaggccttggtgatgcccatcagcaggcgggtgcaggtgggcagcttgagctcgaggccgtcgttggtctcgccggcgtcgatgcgcttctgcacggactccttggcatcctcaaagcggatgagatcgacggtggaaccgctgagcagatcggaatcgcccgcgtcctccacccgcaccttgcgcatcatctggcggcagatgacctcgatgtgcttgtcgttgatgtcaacgccctgctggcggtagggcttctgaacctcctggatgaggtagtcgtaaacggcgtggacgccgcgcacccgcaggacgtcctggggatagagggcaccctcggtgagggcgaagcccttctccacggtgtcgccgtccttcacccgcaggcccgcgtagggcagggcgtaggagaccacctcgccgtcgttggcggtgatggtgacgttgcagatggcgttgcgcttggcctcctccagagtgacccggccgctgatctcggccaactgggccatcttcttgggcttgcgggactcgaacagctcctcaacacggggaagaccctgggtgatgtcgccgccggcgacgccgccggtgtggaaggtacgcatggtgagctgggtgcccggctcgccgatggactgggcggcgatgatgcccacggcctcgccctcgcccacgggctcgccaatggccaggttgatgccatagcacttggaacaaacgccactgcgggcgcggcaggtgagcacgctgcggatcttcacggagtggatgccgtggtcctccagcagcttggcgtggtcggcggtcatcatggtgtggtggtcgatgagcacctcgccggtttggggatcgcagatatcctccaccggataacggcccttgagccgctcgccgaaggtctcgatcacctggccgttctccacgatctcgctgacggtgatgccgtcgtcggtgccgcagtcgtgctcgcggatgatgacctcctgggacacgtccaccagacgacgggtcaggtaacccgagtcggcggtacgcagagccgtatcggccatgccctttcgggcgcctctggaggagatgaagtactccagcacggacaggccctcacggaagttggacttgatggggatctcgatggtgcggccggaggtgtcggccatcaggccgcgcatgccggccaactggcggatctgggcggaggagccacgggcgccggagtccgccatcatccagatggggttgtagcggtccaagccggccatcagggcgtcggtcacgtccttggtggtcttttcccaggcctcgaccaccaggcggtaacgctcctcattggtgaggaagccgcgcttgtactgccgctcgatcttgacgatctccttctcggtatcggcgatcaggccatacttcttctcggggatggtcatgtcgtagatggagacggtgagggagccgcgggtggagaacttgtagccccggttcttgatggtgtccagcacatgggcagacacggtgaagccgtgcttgacgatgcacttgtcgatgatcttgccaagctgcttcttgcccacgatgaagttgacctcagggtcgaacatctgctcggggtcgctgcggtccacgaagcccagatcctgggggatgccctcgttgaagagcaggcgtcccacggtagtgcgcaccagcttgtggcggacaacgccgtccacctccgcctcccggcggaccaggatgggcacgtggagctccagctcgccctcgtcgtaggccaagcgggcctcgatgtcgttggagaagacgtggagcacctcgcggggcagcgcgccgtcctcggtctcggcgcagatgccggcataggtgggaatatcatccagggagccggggttcttcacccagacataggaatcgggggtgatggcacccgcggccagggcggccttcaccgcagccacgtcgtcgtaggtctcctcggcggtgtgctcgggatacttctcataggtcaggtagtaggagccgagcaccatgtcctgggtgggcacggtgacggggccgccgtcctggggccgcagcaggttgttggccgagagcatgagcacccgggcctcggtctgggcctcggcggacaggggcacgtggacggccatctggtcgccgtcgaagtcggcgttgaaggcggtacacaccagggggtgcagcttgatggcgcggccctccacgagcacgggctcgaaggcctggatgcccaggcggtgcagggtgggggcgcggttgagcatgacggggtggtccttgatgacaaactccagggcgtcccacacctcggccttgcccttgtccaccatcttcttggcggacttaatgttgttggccaggccgtcctccacaagctttttcatcacgaaggggcggaagagctcgatggccatctccttgggcaggccgcactggtagattttcagctcggggccgaccacgatgacggaacgaccggagtagtccacgcgcttgcccagcaggttctggcggaagcggccctgcttgcccttgagcatgtcggacaggctcttgagggcgcggttgttggcgccggtgacggcgcggccccggcggccattgtcgatgagggcgtccaccgcctcctggagcatccgcttctcgttgcgcacgatgatgtcgggggcgttgagctggatcaaacgcttcaggcggttgttgcggttgatcacccggcggtacaggtcgttcagatcggaggtggcaaagcggccgccgtctagctgtaccatggggcgcagctcgggggggatcaccggcagcacgtcgatgatcatccactcgggcttgttgccggagatgcggaaggcgtctaccacctccaggcgcttgacgatgcgggccttcttctggccggaggcgtccttcagctcggcgcggagctggttggacagctcctccagatcaatgtcctggagcagcttcttcacggcctcggcacccatgccggcctcgaagtcgtcctcgtacttctcccgcatgtcgcggtactccttctcggagaggatctggttcttggccaggggggagaagccggggtcagtgacaatatagctggcgaagtagagcaccttctccagaatacgggggctgatgtccaacagcaggcccatgcgggaggggatgcccttgaaataccagatgtggctcaccggggcggccagctcgatgtggcccatgcgctcacggcgcaccttggcacgggtgacctccacgccgcagcggtcgcagatcttgcccttgtagcggatctttttgtacttgccgcagtggcactcccagtccttggtggggccaaagatccgctcgcagaacagaccgtcccgctccggcttgagggtgcggtagttgatggtctccggcttcttgacctcgccgtaggaccactcgcggatctgctccggggaggcgatgccgatctggatggcgtcgaattcagcgtaactcatatctttgctcgtcctcccttaattagtccatatcctcatcggaatagtcatccgagaagtcgtcgctgtcgtccagctcctctgcgtccgcggcggccaggtcgtcgtcgtcgctgccctccttaagggtgtagcccgcggcggcgaagtcggactccccgccggcgtcgtagccgtagtagtcgtcgtcctcgtcgcggaacttgccgggctggtagttgtcctcgtcgtcgtccttcagctcgatctccgcgccctggtcgtccagcaccttgatgtccaggcacagggactgcagctccttgaccaggaccttgaaggactcgggcacgccgggcttgggcacgttgtggcccttgacgatggactcgtaggtgcgcacgcggccggtgacatcgtcggacttgacggtgaggatctcctgcagggtgtaggccgcgccgtaggcctccagggcccacacctccatctcgccgaagcgctggccgccaaactgggccttgccgcccaggggctgctgggtgaccagggagtaggggccggtggagcgggcgtggatcttgtcgtccaccaggtggtggagcttgaggaagtagacgtagcccacggtgacagggttgtcaaaccgctcgccggtgcggccgtcgtacagccagctcttgccgtcggggcgcaggccggccatcttcagggtctcggcgatgtccttctcgtcggcgccgttgaagacgggggtggccaccttccagcccagggtcttggccgcgtagcccaggtggacctccagcacctggccgatgttcatacgggagggcacgcccagggggttcagcacgatgtccaggggggtgccgtcgggcaggaagggcatatcctcctggggcaggatgcgggacacgacgcccttgttaccgtggcggccggccatcttgtcacccacggagatcttgcgcttctgggcgatgtagacgcgcaccaccatgttcacgccgggggagagctcatcgcccgcctcgcgggtgaagaccttcacgtccacgatgatgccgctctcgccgtggggcaccttcagggaggtgtcgcgcacctcgcgggccttctcgccgaagatggcgcggagcagccgctcctcagcggtgaggtcggtctcgcccttgggggtgaccttgccaaccagaatgtcgccggcgcgcacctcggcgcctacgcggatgatgccccgctcgtccagatccttcagggcgtcctcgcccacgttggggatgtcacgggtgatctcctcggggcccagcttggtgtcgcggctctcggtctcgtactcctcgatgtggatggaggtgaacacgtcctccttcaccatgcgctcgttgagcaggatggcgtcctcgtagttgtagccctcccaggtcatgaagcccatgaggatgttcttgcccagggcgatctcgccgttgttggtggaggggccgtccacaatgacctcgcccttctccacccgctggccggcgtccacgatgggacgctggttgatgcaggtgccgtggttggagcgcaggtacttggtgagccggtagtcctccacgcggccgtcgtcgtagcggacggagacggagtcggcggccaccttggtaaccacgccgtcgtcctcagccaggatggccacctcggagtcgatacagttcttgtgctcctggccggtggccacgatgggagcctgggtggtcagcaggggcacggcctgacgctgcatgttggcgcccatcagggcgcggttggcgtcgtcgttctccaggaaggggatctgggcggtggcgatggagaacatcatcttgggggagatgtccatatagtccacctgatcccggtccacgtcgatgatctcgttgcggtggcggcaggtgatacggtcgtgtaccaggcagccgttctcgtccagcggctcggtggcctgggcaatggtgtactggtcctccacgtcggcggtcatatagtccacctgatcggtgacgtggccggtggctttatccaccttgcggtagggggcctcgatgaagccgtagcggttgatgcgggcataggaggccagataggagatcaggccgatgttgggaccttcgggagtctcgatggggcagaggcggccgtagtgggagtagtggacgtcgcgcacgtcgaaggaggcgcggtcacgggacaggccgccggggcccagggcggacatacggcgcttgtgggtcagctcggccagagggttggtctggtccatgaactggctcaggggggaggagccgaagaactccttgatggaggcggtgacggggcggatgttgatgaggctctggggggtgacgatgtccagatcctggatggtcatgcgctcccggatcacccgctccatgcgggagaagccgatgcggaactggttctggagcagctcgcccacgcagcgcaggcggcggttgcccaggtggtcgatgtcgtcggcggagcccaccccgtgggccaggcagttgaggtagttgatggacgccatgatgtcgtccacgatgatgtgcttgggaatgaggtcgtcgatgcgctccttcacggcctccttgagctcctcgccggtgtaattctggagcagctcctggagcacggtgaagcgtaccttctcactgacgccgcactcctccggatcaaagtccacgaacttggacatatccaccatgtgattggagaatactttgatctgcacgccgtcgagctccagtacaacctcgttgacgcccttgtcgtccagctcgtgggcccgctcacgggtgagcacctcgccgggctcggcgatgatctcgccggtcatggggtcggccacgggggcggccagggtctgattcaccaggcgggtccagatcgacagcttcttgttgaacttgtagcggcccacggcggacaggtcgtagcgccgggggtcgaagaacagggcgttgagcaggctctcggcggagtccaccgtggggggctcgccggggcgcagcttgcggtagatctccagcagcgcgtcctcataggttttgcaggcgtccttctccagggtggcaacgatgcggggatcctcgccgaacagctcgaggatctcggggtcggtcttggggcccaccgcacggatcaggcaggtgatgggcagcttgcggttcttgtcgatgcgcacgtagaaggcgtcgttcaggtcggtctcatactccagccaggcgccccggtaggggatgacggtggtggcgtaggtgatgccgccggccttgtcctcggtgtgggagtaatagatgccgggggagcggacgatctgggagacgatgacgcgctcggcgccgttgatgacgaaggtgccggccttggtcatcagggggaagtcgcccatgaagatctcctgctccttgatctcctcggtctccttgttgcgcaggcgcacccgcaccttgatgggcgcggcgtacgtggcgtcccgggccttgcactcctccacgctgtacttggggggctcatccatggagtagtcgatgaaggagagctccaggttgcccgcgtagtcggtgatcgaggccacgtccttgaagacctcccgcagtcccgtgtccaggaaccactgataggagttcttctgcacctccaggaggttgggcatgtccaggatttcttcatggcgggcaaagctcttgcggagggtcttgccgtagtagacgtccttgaccatcgtagaaaaaacacctcgttttctttgtttggggagcgttgggcggcagcgctctccggtttccatcggctgtcttccgtcaaacccgacaaagcgcggcggggaagaaggaagtacacgctcggctgtgtggacaaaaaagaaacaaatcctcttgcgctttcccgccccgcatgctaaactgtgtccaagctgggaaaaaatcgggaaaactggattggaagataagagcatttcagtataccatgaaaagggaacaaaagtcaattgttttatccgtcgaatctggagaaatccagattttttttatattctcatgaacagaaggggagagcaggcatgctggagcggtttctggatcagattggcgaggtactccgcctctgcgaggatacggacggaattctggtggtcaaccgggaggggatcatcgaataccaccggattccgctgaacagctactggtgctcccaggacacggtggggcggcacattctggagctctatccggagctggacggggagagcagcaccatccttaccgccctgcggacgggccgggccagctacaacgttctccaggacatcaacaaccaccggggggagcgggtgctgctggagtccaccaccatccccatcgtggtggacggccgggtggagtgtgtggtggactcgtccaagtaccacaccattgaccagcgggtgatccgtggcggggagggcggcggcctgtccaccctggaccggatgctcacggaagacccggccatgttggccctcaagagccgcatccgggacgtggccgggctggactcgtcggtgctcatctatggtgagacgggaacgggcaaggagctggtggccgagtcgctccacagcgagggcggccgggcgggaccttttgtctcccaaaactgtgcggccatcccggccaccctgctggagagcctgttttttggcacggaaaagggaagctacaccggcgccctcacccgcaaggggctgctggaggaggcggacggcggcaccctgttcctggacgagatcaactccatggacccggccctccaggccaagctgctcaaggtgctggaggagaagaaagtgcgccgtctggggggcagccgggacatccccttcgacgtgcggatcgtggcggcggtaaacgagaagcctcagaagctcatccgggaggggcgcctgcgggaggatctgtactaccgcctgggggtgattcgcctgacgctcccgcccctgcgggagcggctgtgcgacattggcccgcttgcggactactttatcgagcactataaccggaagctgcaccggagggtgcgggggctgagcgagcgggccctccggctgctccggggctatgcgtggccgggcaatgtgcgggagctgaaaaacgccatcgagggggcggtggccgtcgcccggggggagcgcctcaccgtggaggacatggaggagatcctggccgggcggctgggcggcctgaaccggccgccggagctgccggaggccctgcgcctggaggagagcttttccctcacccgggcgctggactcctacgagcgggagctgctcagccgggctatgcagcaggccggctccatctcccaggcagcccgcctgctgggcctgtcccggcagaatttgaagtacaagctgaaaaaatttgacctgtaaaaaattttgcgccgcaaaatattttccccctgaaaaagggcccgagagccggaggtatgtcctataataccggccctcgggtccttttttgggcattagggtgagctggcatcccgtttgcaaagttaagtgcacgaaacttgccgcaggcagaaaggaaggctgatatgcggagactttggtacaacggaacggttgcctcgatggacggcgccatgcgccgctatgaggcggtgggcgcggaggacggcagactgacctttttggggagcgttcaggaggctctggcgcaggcgtgggatgagacgagggatttgcagggtgccatggtgctgcccggcttcaccgattcccacatgcacctgctccactacgccatgattcagaaaaacctctccctgtttggcgtggcatccatcggggagatcatagaacgggggcgggcccggattgagcgggaccacccatcctacctgatcggcatgggctggaatcaagagaccatggtggaggggcgcctggtgacgcgggaggatctggaccgcatctccaccgatatcccggtgtgtatgctgcggacctgcctgcacataggggcctgcaactctgtaatgctggagcgcatccgcgcgctggaggatgtggcgcccgaggtgctggccctggtggactttgccaacggcatcctgcgggaggatgccgcccgcctgtatatgaaggtgctcccccaggcggatgacgcctatgtaaaggagctgatccggctgggccagcgggatctgaacgcggcgggcattacctgtgtcaattccgacgatctgaaggccattgccggagtggaccctatccgattgatcggcatcttccgggagatggaggcggacggagaactgacggtgcgggtctacgagcagtgcctggtggagcccgaggactttgagcggctccaggcggtgcgcagcgatccggccgaccgggagagcctcttccgcaccggcccccgcaagctgctccaggacggctccctgggggccaagtcggcggagatgattgacggctacctggacgagccggacaaccacggcatccctatctacaccgaggaagagctgtgcagccggattcgcgcggcccataccgcccatatggacgtggcggtgcatgccatcggcgacctggctttccgtaaggtgtgcgccgccatcgagcgggtggagcgggaggagccctggccggatcaccgccacggcatcgtccacgcccagactaccacacccgccctgctggagcggatgaaggccctgggcctccaagcgtacatccagcccatcttcattgacgccgacatgaacatcatcgccgagcgggtgggggaggcccacgcgaaggagtgctacaactggaaggccatggaggatctgggcatccggatcagcggcggctccgactgcccggtggagcccttcaacgtgttggacaacctgcgcgccgccgtcacccggcagaaccgggcgggcaccagggtctatctgcccgagcaggccctcaccgtggagcaggcggtgcgcctgttcacctccgatgccgcctgggccagccgggatgaggctgtccgcggcaccctggagctgggcaagcaggccgaccttgtggtgctggaccgggatctgtttaaaatctctcaccaagactttaatcgggttaaggttttggagacggtgttaaatggtgtgacagtctatcgggcggaaacgctgtagtccgttcacagcttagatcataggcaacgaaacaacggggaggaagcactatgaagaagaaatccttctggaaggataccgtgattgtaggtttggcgctgttttccaccatgtttggtgccggaaacctgatattcccgccgcagattggcctgttcagcggacaggagtggttcctcggtgctatgggcctgctgctgggtggcatcgttctgccggttatggctctctgggcggttaataacgtcggagagggctctgaggacctaatgggccacgtgtctccgtggtgttataacgcgttttatctggtgagctgtacactgatcgccatgggctctaccttacccaagagtgccgctaccacttatgaaattggaattcagccgcttttcccgcaggtgcccaactgggcagttatcattgtgttctttgttttggtctacttttttgcctgtgaccgggagtcggtgatcgacaagctggggaaatatatgacgcctatcctactggtgcttctggcaattgtccttatcaagggtgtggtgacgccggtaggggagccagtggataccgggatcggaaacccctttggggatgccatgctgacggcctataatacaggcgatctgacggtcggcatcatgtttgcaagcgtcatcctgggtgatctccgccgccgaggctatgacggaaaggagagccgaagaggcggatttatggcgggtatcgtctgcattatcgccctgtttgctgtttatggtactctgacctacattggcgccacggctagcggtatctatgcccaggatactgcccagaccgcgctgctctctggtgtcattcggcaaatcatggggactgccgggctggcttgtatgggcggcgcggtagccatggcctgtctgacgactgcggtcggcattggaaccacagttgtctcatttatttatgaatttctaaaaaagagagtgccctacaagctgctgatgctgatagcctgcatcatcggagttttcatggggatcaccggagtacagaatatcgtgaactatgttacaccaattttcctggtgatctatccggtctgcattgttatgaccatcttgggactgctggaccgctttctgccgaacgacggtttctacaagggtggcgttttgatggcggggattgtgagcctgggggacgcggtgcttagtgtggcgcctgacattggctggttgaaggacctgatgagtatgttcccgctctccgatttgggctttgcgtggctggctccagccgttataggcgcagtagtgggagcccttctgtgcaggggaaaggaaaaatatcaggccatgggcgacccaattgcagaggaaattgcaaaaaacgaatgattgaatagtgccaggggagcggcggaggggggaagcccctccgccgctctggcggttctgactggaaacgggccggaaagctttgcaaaatctagtgattttctgattgactttagaattcgcatatggtaaaattctaaatcgcgcaggtatgcctgccaaaaggggatacgcggcagaaaagccagacggccctgcaaatcaagcgatgggaggcagaccgcatgctgacggaactcaagcagggctccaaggtggtcggcgtcaagcagaccaagcgggccgtcaatgatgggaaagccgcccgggtttttctggcagaggatgccgatcccagggtgaccgccccggtggaggccctgtgcgcagaaaaacagattccggtggagcgggttccccagatgaaggaactgggctccgcgtgcggtatcgccgtgcccagcgcggtggccgcgttgctgcactgattttagcgaaacggaataattttcatccgtttcgttaaaatatattctttagaaaccaagaaaggaggaaaaccatgcctacgtttaaccagctcgtccgcaagggacgcgaggccgcgacctacaagtccaccgctcccgccatgcagaagggcctgaacaccctgcagaaccgcatgaccgacctgccttctccccagaagagaggtgtgtgcactgcggttcgtaccgccacccccaagaagccgaactccgctctgcgtaagatcgcccgtgtgcgtctgaccaacgggatggaggtcaccgcctatatccccggtgtcggccacaacctgcaggagcactctgtggtcatgatccgcggcggccgtgtcaaggacctgcccggcgtgcgttaccacatcatccgcggcactctggatgcccagggcgttgccaaccgcatgcaggcccgttccaagtacggcgcgaagcggcccaaggccggcaagaagtaatttttctccgtaaaaattcttctgaaaacccaataagagactttatgcgcaaacgcgcaaggcagttgtccttgcggaagcgcttacctatatataataggggcgttttctgtggggcactggacaagcaggcacttgtcttacacgggggcttttctgaaaagccttcgagtacctatgaaatcatactatgaaggagggaagcaaagtgcccagaagaggaaacgtacccaagcgggaggttctgcccgatccgatttacaactccgtcctggtgaccaagctggtcaacagcatcatgctggacggcaagaagggtgtggcccagaaggtcgtctacggtgctttcgacatcatcaaggagaagaccgagaaggaccccctggacgtgttcaccaccgctctggagaacatcatgccgtccctggaggtcaaggcccgccgcgtgggcggcgccacctaccaggtgcccatcgaggttcgccccgagcgccgtcagacccttggtctgcggtggctgaccaactactcccgcgcccgcagcgagaagaccatgaaggagcggctggccggcgagatcatggatgccgccaacaacctcggctccgcggtcaagaagcgcgaggacacccacaagatggccgagtccaacaaggccttcgcgcactatcgctggtaataaggagttagagtatgcctaggaaagttaccttagagaataccagaaacatcggtatcatggcccatatcgatgccggtaagaccaccaccaccgagcgtatcctctactacaccggcgtcaactacaagatcggtgagacccatgacggcaccgccaccatggactggatggctcaggagcaggagcgcggcatcaccatcacttccgcggctaccacctgctattggaaggggtccaaggaccagttcccccagacccgcatcaacatcatcgacactccgggccacgtggacttcaccgtggaggtggagcgctctctgcgcgtgctggacggctctgtgaccgttatgtgcgccaagggcggcgttgagccccagtctgagaccgtgtggcgccaggccgaccactacaaggtcccccgcatgatctacgtcaacaagatggacatcatgggcgctgacttctataacgtgctcaacatgatccacgaccggctcaagtgcaacgcggtgcccatccagctccccatcggctccgaggataccttcaagggcatcatcgacctggtggagatggatgccgacatctactacgacgagctgggcaaggacatgcgcgtggaggagatccccgccgatatgctggagctggcccaggagtaccgcaccaagctcatcgacgcctgtgctgacatcgacgatgagatcatggagctggccctggaggagaagcccatccccgaggatatgatccgccgtgccctgcgcaagggcaccatcgagaacctgctggttcccgtgacctgcggtacctcttaccgcaacaagggcgtccagaagctgctggatgccatcgtcgacttcatgccctccccgctggacatcccggccatcaagggtgtgaaccccgacaccgacgaggaggacgagcgtcccgccgacgacaacgcgcccttctccgccctggcctttaagattatgaccgacccctacgttggccgcctgtccttcttccgtgtgtactccggcaagctcaccaccggttcctccgtgctcaacagcaccaagaaccagaaggagcgcatcggccgcatcctgcagatgcatgccaaccaccgggaggacatcgaagaggtcttctccggcgacatcgctgccgccgtgggcctgaagaacaccaccaccggcgataccctgtgcgatgataatcaccccatcatcctggagtccatggagttccctgaccctgtcatccgcgtggcaatcgagcccaagaccaaggctggtcaggagaagatgggcctggcgctggtaaagctggctgaagaggaccccaccttccgtacctggaccgacgaggagaccggccagaccattatcgccggcatgggcgagctccacctggagatcatcgtcgaccgtctgctccgcgagttcaaggtggaggccaacgtgggcgcaccccaggtcgcctacaaggagaccatcaagaagtcggtcgagcaggataccaagtatgcccgccagtccggcggtaagggccagtacggccacgtccgcatcaccgtggagcccaatgagcccggcaagggctatgagttcctcaacgagatcaccggcggcgttatccccaaggagtatatccctgcggtggacgccggtatccagggcgccatgcaggcgggtgttctggccggttaccctgttgtggatgtgaaggtccacctgaccttcggctcctaccacgaggtcgactcctccgaaatggcgttcaagatcgccggctccatggcgttcaaggaggcctgccgcaaggcggacgccatcctgctggagcccgtgatgaaggtttctgtcatcgtgcccgacgagtatctgggcaacgtcatcggcgatctgaccagccgccgcggcatgattcagggccaggagagccgtcccggcgccactcaggtggatgccctggtgcccctggccagcatgttcggctacgccactgacctgcgctcctccacccagggccgcggccagtactccatggagccccacagctatgtggagatccccaagagcattgccgagaagattatcgcggagcggggccgcaaggacgattaatttccgtcctttggcatttctcgcaacaagggtattgcattttatcctgcaatgctatacaatattttcgcattattgtggaaataagaaccatcttactatcagaatttaaggaggaacatccaaatggctaaggctaaatttgagcgtaccaagccccatgtcaacatcggcaccatcggccacgttgaccacggcaagaccactctgaccgccgctatcaccaagtatctggctctgaagggccaggctcagtacgaggattactccagcatcgacaaggctcccgaggagcgtgagcgcggcatcaccatcaacaccgcccacgtggagtacgagaccgatgcccgtcactatgcccacgttgactgcccgggccacgccgactatatcaagaacatgatcaccggtgctgctcagatggacggcgccatcctggttatcgccgccaccgatggccccatggctcagaccaaggagcacatcctgctggcccgtcaggtgggcgtgcccgccatcgtcgtgttcctgaacaagtgcgatcaggtggacgacgaggagctgctggagctggtcgagatggaggtccgcgagaccctgtccaagtacgagttccccggcgacgatatccccatcatcaaaggctccgctctgaacgccctgacctgcgagggcggtgtggacgatcccgacttcgcctgcatcaaggagctgatggatgctgtcgacagctatatccccactcctgaccgtaaggcggatcagcccttcctgatgcccgtcgaggacgtgttcaccatcactggccgcggcaccgtcgctaccggccgtgtggagcgcggtaccatcaagatgaacgaggaagtcgagatcgttggcctgaccgacgagaagaagaagaccgttgtcaccggcatcgagatgttccgcaaactgctggactttgctgaggccggcgacaacatcggcaccctgctgcgcggcgtcgccaagaccgacatcgagcgtggccaggttctgtgtaagcccggctccattcacccccacaccaagtttgtgggccaggtgtacgttctgagcaaggacgagggcggccgtcacacccccttctttaacaactaccgtcctcagttctacttccgtaccactgacgttaccggcgtcatcaccctgcccgagggcaccgagatgtgcatgcccggcgataacgttgacatgaaggtggagctgatcacccccatcgccatcgagaagggcctgcgttttgctatccgtgagggtggccgtaccgtgggttccggcgtcgttatcgacatcgaggagtaatctcactccagctttctcgcaggagggtgaccgcccgagggaaaagcgtcgttatcgacatcgaggagtcattgatgctcccttggaaaatccccgccataaggcggggattttcttttgccgcagtgcggccgcccggcccccatctgcggtggggcgcgccgggagacgcgtgcagggttttgcccaaaggacaaaaccttgacgcaggcggaattcatttccgccgagcaagcaaaatgaacagggttcccacagaatcggagcttctgtggaatggccgcaccgtggcaaacgcgtcgtcatcggcattgaggaggtaatatttcccgagcttttccacaggagggtgagcaccggcggaaaagccttgttatccaccttgtgaagttcttcttcatttcagcagaaagcctgccgatcggcaggctttctgctttttaaaaagctgctttatccagaaattttttaaggaaaagggacgagctgagtggacagtcccctttttttatggtacaacaggaagtggaaaggggcgtgccagacatgcagagcatattgaccaacctgggagccgtcaccccggacgaggcagaggagaccttacagacggtgaccgactttctgaaagggctgaatctggagaagctcatcaccctgctgctccttctggcaggctgcctggtggtcatgaagctggttctccggctgaccgaccgggccttcctccgcctggagctggagcggagcctgcataccttcatccatgcggccctgcgggttattttgtggatgattaccctgtgtatcgttctggactacgtgggagtgcccatgactagcctggtggcggtgctcagcgtcattggactggcggtgtctctggccatccagggcactctgtccaacctggccggcggcatccaggtgctgctctccaagcccttcaaggcgggggactacgtggaggccggcggcatctccggtacggtgatggaggtcgggctggcctatactaagctgtgcacggtggacaacaaggtgatctccgtgcccaacggacagatttccggggaaaagatcatcaactacagtacggaagagcggaggagagtagatctcaccttcaacgcctcttatgacagcccgcttcagcaggtgaccggcgttctgcgggcagtcgtggccgcgcaccccatggccctggccgagccggagccctttgtgcgggtcaacgcctaccgggacagcagcattgagtatgtggtccgggtgtggtgcgccacgggggattactggacgctgtactacgacctgttggagcaggttaaggaggcttttgaccagaacggcattgagatgacctacaaccatctgaatgtccacttagtggaacggaaggaggaagaacagtgagtaacgataccattgcgggcagcggactggaaaagatgttctacgggcagatcctcagcatcctggtgatcatccctttggtggggtggattgccgccattgtgggtatcgtcctgttcctggttggccttcacgaggccgccggggccgacgagggctaccgcaccgccttctatgtggagatcggcattctggtgctgagcgtactcgcggtttttatcggggtgctgaatatagtcacttcgattctgagtctggtggtgatctacctggtttgtactaccactgccggcctgcttgaggtcaaaggcgacctgggcacggcagcccggggacggtttgcgtggaagttctatgggggctgcacggccctggtggtggtctgctctatcctgagtctcatcccgctggtcaacatactggcgatggtggtaatcgtccccgcgtccatcgcgtctgttgtgggcgggatcctcctgctgatattcctctaccgggcctgcaaaagtctgcggtattgaatacggaaaaacgcggcgcgaaagcgccgcgttttgcattcaggcgggcatctccagcccgtggatgaagcccccgagctgggcggagagcacatcgccgccgatgaccgtgctcttgtagacgagcaggccggcctggatgccgctctcaccggtggggtagttggtgatctcataggtgtaccgcttgacgcgcttgccgcagtagtcggtcagatcgaagccctggctggcctggagttccaggtactggctgtaggtctcgtcgaactgctcggggatgatcagctcctccacggcgatggggtcgctggagaccgaccagccgtaactctccagataggcgatccggtcctcgttggtgcggactcccttggggctgaccgcagcggaggccgccgcgccccgcccccccagcagcccggcggccgccaccagtacgccgcagaccacggcggcagccgccgcgacggctacaattcggcccttgcggaccttggcggtgatgatgaacacagcgcaacgctcccttccgaaaagtggtcgtgatgattggtatgttcttttccaccgttgtatgctaaaatgttgaaaaaaggacgagccacaggaggagcctatggagcggttggataaaattttggccaatacaggccggtggtcccgaaaagaggcgcgggagctggtgcgggccggccgggtggccgtggacggcgtgacggcccaggcggcggacgggaaatacgaccccgcggcccgctttgaggtggacggcgaaacggtttccggggagcggctggtttacctgatgctccacaagccggcggggctggtgtccgcgacggaggacccccgccagcccaccgtgctggagctgctgccccagcatctgcgccgggtagggctcttcccggcgggacggctggacaaggacaccgagggcctgctcctgctcaccaatgacggacccctggcccaccgcctgctggccccccggaaccacgtggacaagacctacttcgtccgggtggacggggaactggatggggcggacgcggcggccttcgccgcagggatgatgctggaagacgggctggtctgcctgcctgcggggctggaggtgctggagcagccggacaccgccctcgttaccctacacgagggcaagtaccaccagatcaagcgcatgctggcggcccgggggaagccggtggtgtacctcaaacggctgaccatggggccgctcatgctggacccggtcctggaaaggggggagtggcggcctctgtctgcggaggaggtggccgctctgcggcaggcgtaggggcggcccgagcggggaacgctcacggccaacttgcccggcacagccgggcatgccagcgctttggcttagcgctgcggtttcgtctgcgccctgccttcgtctcccagcccacggcctctgtgcttcctgtcagctttcggcaatttcaacaaaaaattttgcaaaacctattgaaaagggcaaaaagacccggtataatagaaaggaaatggacgagagagcggtttgtccccctgcgggggaatcaaaataaggaggctatcaccatgtccagcaggatttttcagagcgttgtcttacagatgaaggacagcacggagagagccatcggcgtgatcgattctgagggaacggtggtggcctgcaatgagttgagctgcatcggggagcactggccgggcgccgtggaggcggtcaacaggggcgagggagacgcggtccgctttgatgggcgcaccttcaaggccctggccggctggggggcccagttcgactatgccgcctttgtcaagggtgaggactccgaggcgcagatgctctgcgccatggccacggtggcgctgaacggcgccaagacctactatgaggagaagcacgacaaggccacctttgtcaagaacatcatctccgacaacattctgctgggggacatctatgtccgcgccaaggagctgcactttgtctctgaggcgccccgggcggtgttcctgatccgccaggtggagaccagcgatcccgccctcattgacgtggtgcataccctgttccccgacaagcaggtggacttcgtcctctcgatcagcgagactgacgtggccctcatcaagcagctctctgagggggcggagccacgggagctctataagatcgccaagcagatcgaggagaagatcaccgaggagctccatgtgcgggtggtcatcggcatcggcaccatcgtgggccacatccgggagttggcccgggcctacaaggaggcggggatcgccatcgacgtgggccgggtgttcgacacggagaagagcatcatcaattacgagaatctgggtatcggcaggctgatctaccagttgcccaccaccctgtgcgagatgttccttcaagaggtgtttaagaagaaccccatcgacgccctggaccaggagaccctgttcaccatcaacaagttctttgagaacaacctgaacgtatccgagacggcccggaagctctttgtccaccgtaacaccctggtgtaccgcctggagaagatcaagaagcttaccggactggacctgcgggagtttgacgacgccatcaccttcaaggtggcgctgatggtcaagaagtacctgatctcccggggcatcgacaactgagtgcactgccagcaggggcgccggagacggcgtccctgctggcagtgggcatttctttcgaatacgataaatgaggtaaccgagcgtgatacggcttattgacattcaaaagtcctacgacaacgggacaaaggccctgaagggggtcaacctgcgcatcgacgacggggaatttgtctttctggtgggtccttccggctccggaaagtctacgattctgaagctcatcaccgccgaaatcgcgcccaccggcgggcggctgatggtcaacggctacaatctgaacaacatccggccccggcaggtgccctacatgcggcgcaccctgggggtcatcttccaggatttccggctcattgagaaaaagacggtgcgggagaacctgacctttgccatgcgggcggtgggggcctccccccgggagatccgcaagcgtgtgccctacgtactggagctggtgggcctggaccagaagggggaccgcaagcccaaccagctctccggcggcgagcagcagcgggtggccatcgcccgcgccctggtgaacaacccccagatgatcatcgccgacgagccgacgggcaatctggaccccatgcgctccctagagatcatgatgctgctggagcgcatcaacgagctgggtaccaccgtgctggtggtcacccacgcgaaggaactggtcaaccgcttctccaagcgggtggtggccattgagaacggcaggatcatcagcgacgagacgggcgggtattacaacaatgagacaacgatatgatttcggctatttcctctccgagggcttccacagcatcttcacccacggctttatgtccttcgccgcggtttgtatgattatctgctgcctgctcatcatgggctcctttaccctggtggcggtgaatgcggagaacatgttcagcgatctggaggccgagaaccaattcacggcgtacatcgacgagagcctcacccaggaggaggccaaagccctccaggacgacatcgaggcggtgcccaacgtggcccgggcggaattcatgaccaaggagcaggcccaagaggagtttgaggccgattatgagggcaacgagctgtttgacggcctgccctccgatgtgtaccgggaccggttccacgtctatctggacgacatcagcaagctgactgagacagagaacgcggtaaaagaggtaaccggcgtggccaagactaaatcagcccccgagatcgccgagggcttcaccgtcatccgcaacatcgccggggcggtggccgtgatcctagtggtgatcctgttggcggtgagcctgttcattatcgccaacaccatcaaactggccaccttcaaccggcgggaggagatcgccatcatgaagatgtgcggcgccaccaacgcctttgtccgctggcccttcgtctttgagggcctgatcctggggctggtgggtgcggtggcggccttcttcctccagtggggcatctatgtgctggtgggcagcgccatcagcggctcggacaccatctccctgatcaccgtgctgcccttccagcccatggctttacgggtgctgggcgtgtttgtcctcactggcttcgtcatcggcgcgggcggctcggtgctggccatccgcaagttcctgcaggtataacggcagcggcaaaaggaggcttccatggcgtttgacagatcccttcggcgggcggcctgcgccctgctgacggccgcgctgctggttcccgcctggggcgggctggcccggcaggtgcgggcggcggcccagagcgagatcgacgcgctgaaggccgagcaggcggagagccaggtccggcaggaggagctgaaagagcagctagctgacgtgaaagaggaccaggcggccgcccagcagaagcggcagctcctacagcagcagttagaggcaatcaatgccgagctggacagcatcaacgcgcagatctcctactatgacggggagatcgcccggaaagaggcggagcgcagggaggcggaggccaaagagcaggcccagtatgagcggttctgcgagcgggtgcgcgccatggaggaggaggggacggtgtcctactggtccatcctctttaacgccgaggacttctccgacctgctggaccgtctggccgatgtggacgcggtgatggactacgacaaccaggtcatggaggagctgaccgcggcccggcaggagctggagcggcttcaggcggagctggagagcgcccgcgcggaggagcaggcggccagggagcagcaggaggccaagagggcggagcagcaggccaaggtggcgcaggcccagaagctgctggaccagatcgacgccgatgtggcggaggtcaaccggcagttggacgcagagaacgcggagtgggccgccatcggggcggacatcgcccggaagcagaaggagctggaggagcagcggaagcagaacaacgtccagctcccgcctaccggcgacggctggctgtggcccctgcccgcgtccaatttgaagctgacctcggccttcggctaccggatgcacccggtggatcacgtgccaaacagccacaccggcattgacgtggccgcctccaccggcgtccccatctacgcggccaggggcggacaggtcatcatgtcggagtatggcgccggcgccaactggtcctacggcaacttcgtggtcatcgaccacggggacggcaccaccaccctctacgcccacatgtcctcgcgggcggtgagcgagggggagctggtgacccagggccagaccatcggcgccgtgggcgacaccggcaacgtgacgggcccccacctccactacgaggtgcgcctcaacggccagcggacggaccccgaggcatattatcccaatcttcccttcattcgggcctataattggtaatggaacggacataaaaggagcggcaacgtggcaaagaagcagagtcagaaaaagagaccccagaaacagaaaatcgagtggcgccgggtgtttgtggccgggctggccgtggtgatggccctcctgctgctgctacccatgatcagcatgatcgccggcggcgtgggcgcggtgacgcagagcgagatcgacgcgctgaaggaggagcagcgggagagccaggtcaagcagcaggagttgaagaaccagctggccgacgtgaaggaggaccaggcggctgcccagcagaggcggcagctcctgcagcagcagttggaagccatcaatgccgagctggacagcatcaacgcgcagatctcctactatgaccaggaaatcgcccagaaagaggcggagcgcagggaggcggaggccaaagagcaggcccagtatgagctgttctgcgagcgggtgcgcgccatggaggaggaggggacggtatcctattggtccatcctcttcaacgccgagaacttctccgacatgctggaccgcctggcggacattgacgcggtgatggattacgacaaccaggttatggaggagctgaccgcagcccggcaggagctggagcggcttcaggcggagctggagagcgcccgcgcggaggagcaggcggccaaggaccagcaggaggccaagaaggcggagcagcaggccaaggtggcggaggcccagaagctgctggaccagatcaatgccgacgcggcggagctcaaccgccagctggacgacgagatggagggcgcggcggagatccaggcggagatcgcccggaagcagaggcaactggaggaggagcgccggcagaacaatgtcaccatcgactcggagaccaactacctgtggccgctgcccggctactaccggctgacctccctgttcggctaccgcattcaccccatcaccggcaaggcccacagccataccggcatcgacatccccgcccccggcggcacccccattcaggcctgcaagagcggacaggtggtcacctccgcctaccactactcctacggcaattacgtggtcatcgaccacggcaacggtaactccaccctctacgcccacatgagctcccgggcggtgagcgaggggcagatggtgtcccagggccagaccatcggctatgtgggcaccaccggcagctccacgggcaaccacctgcacctggaggtgcgggacaactacacccgtgtggacccggagagcaagttccccagcctgagcctgacccacccttggtaatgtccggatagcggcagggccgcgttgctgtggaaattccgcccgctgtgcgcgggcaaggcccagaggcgggcggaggcatcggcctccgcccgcgctggtttttctggaaaggatctgatcccgtgcgaaagaaacgtttttccctggcccagcttctgctggccattgcactcaccgccgctgccgtgctgggctgcggactcctggccgtccgtgcctggatgggggagggtgggcgttccctggtggaggggctgcggctggtcaacaccctctttgtgggggaatatgacgagacagaggtggtggacgccgccctggagggcatggtgtccggcctgggcgaccgctggagctactacctgacggctgatgagctggaggcccagaaccagcgccgcaccaaccagtatgtgggggttgggattaccgtcaactacacacgggaggagggactctatatcctcggagtggaggccgggggccccgccgaggcggctggattggaagccggggaggtcattaccgctgtggacggcgtctccctggcgggagaggcacgctatgagggcgcgaatcttatccagggggaggcgggcaccaccgtcaccctggaggtgctgggggaggacggggcggcccgcaccgtggaggtggagcgggccgagctgaagaacgacccggtggagagccggatgctggagggaaaggtgggctatgtgcgcctgctcaacttctacgaccacagcgcccagcggctggaggaggccgtcacccagctccgggagcagggggcggaggcgctggtctttgacatgcggaacaacggcggcggctacctgagccagctcaccgacatgctggacttcctgctgcccgagggccccatcttcatcagccgcgaccgggcgggccatgaggagatcaccaactccgacgcggactgtgtggaactgcccatggcggtgctggtcaacgccgacacctactccgccgccgagtttttcgccgccgagctccaggagcagggcgcggcggtgatcgtaggggagcccaccagcggcaagggctactcccagcagaccttccctctgccccacggcggcgccgtggccatctccaccggcgcttacttcaccggaagcggcgcctccctcatcggcaccggcctgaccctggacgcggaggtatacaacaccggagcggaggatgctcaactggccgccgcgctggaattgctggaaatccggtaaaaaagtcttgactgtaaacccacttgataccctaccgtggagacaaggaggcgagcagaatgacgatcggtgagctggagaccagcttgggcatgacccgcgccaacattcgcttttagggaagggataaaaccccaccggcttcgccggtggggttcagtctttggcaaaagtcgttagatccaacgtgaaagggaacccggatggttcatctccgcatcaggagccgcagcaagcggcggtcgtgctctgaatcgccctgcggagcgctttgcccctctgccgcccggcggacaggcggcgtggggaggctgggctctctctgcccggccagcagaaagccgctggtcagggcggtgaggggagccacagtcaccagaccgaaggaacccacgatggtgtgtatgatttctgaggcgacatacttgtagttgagaatgttataaaggggagtgccctgggccataaagaccatgagcagggcgacgtagccgccggagtaggccagcaggagggtggttgtcatagtgcccatggccgcccgccccacattcataccggagcgtactgcctcccagcgggagatatcagggcgctttttcactacctcgttgaccgcagatgtgatatccaccgccagatccatcaccgcgccggaggagccgatgaagatcgccgccataaagatctgggtcaggttgagatcctgatacccggagtagagcagactctccgagtaggacataacggccccgtggatctgaaacaggtcggtaaacacaatgcccagcacacatgtgaccagtatccccaggaacgcacccgacacggcggcggcgcaccgccgctcgaagccgtagaccagggcgatgatcagcagggtgagggccagagtaaccgccaggccgaccaggatggggttccagcccttgaggtagaggggcaccagaaccttccacagcatcagcaccgtcagcacgaaggagacgatggcccgcaggccggtacgcccggcgaagaggatcaggaacacggcgaagacggcggccagcagagcctccttgccgatgcggtagtggtcggtcatggtgacggagagaatctcgtccccctggtagctgaccaccaccatggccttgtcaccgggggcgaatagcttgtcctgctccagggagccgttgagcatgttgatgccggtggcggtccgtccctgaaaccggccgcccagcagctccagagtgcagcgctgctcaccggagcggacgagcccggtgtccacgatggtggagtcgtccaccgccagcacccgggccgcgcagcggtcggcctcctggtactggacggccccttcatacccggtggggaggaggagcagcagggcggtcagcgccaggcagagcacgacggggacgtaatagcggcgctgggcggggtcacgtagaaaacgcatagatggataagtcctttctgcgccgaggcggatggggtcgggagaccccatccgcctcggctgtatggaagtgggaaagcaggggttaggctatgccgagcatgccggccagcttgtgatagatctgagtattgtcgtagtagccgttgaactgcccggcgttaacaccgtgggccagcacggccacgggcaggccggtgtggctgtaagaggtgaaggagatgccggacttgttgttgatgatgtgggtgagggtgacgctcagaggctcgtaggtgccgtagagcacgtattcctcctgctcgtactggctggcagcggtgccgttgacgctcttttcgtaggcggcgcggagctgttccagctcgtagtcggtgagcaccagcttatcgccctcctcgccctggggcttgaggccgaagagcgcctccacatccttcaggacatcctcaaaggaggtcttgtcctccttgtacctggacacgtagtcgctgtcgaacttggcgtaggagatcttctggctctccagcagatccagataggtgtcgtagtcggtgccggcaaagccgatggtgaggccgccggtttcgtggtcgccggtgaccaggatcagggtctcatcggcgtgctccttggcgaagtcgatggccacctgtaccgcatcggccagggcctgcgtgtcgtggatggtggaggcggcgtcgttggcgtggcaggcccagtcgatcttgccgccctcgcacatcataaagaagccgtccttgtcctgggagagcacctcaattcccttttccacgtagtcggccagggcccacatgtcgtcggtgcggtcgatctcgtaggccatggcgtcgctgtcggccaggtgctcgtcgatgattaccaccgggccgccggtgacctgctcggcctcagcctgggtcttgaccacatgatagcccgccttttccgccagggcgtacagatcggcctgatctccctcggcgccggtgggcttgagcaggccgccgccggcgaagtactcaaagccggagtcgatgagctccaggccgatgtcgtagtagtcattgcggctggcctggtgggcatagaaggcggcaggggtggcatggttgaggttgacggaggtaatgacgcccaccgaatagcccttctgggcgtggagctgttcggcaatggtttcgtaggaaatggtgccggtttcgtccacgttgatggagccggagtaggtcttgtagccggtggagatggaggtggcggtggaggcggagtcgggggcaaaggagttggagtcataagtcacggcggagccggcggcctcaaagttcatgaagttgaggtactcgggaccgtccagaatggctccgccgttgtcgtccaggctgggctgggcctgccgatagtcggcgtcgttcagcgcacccaggaaatcggatgtggactggatctggggatagctcatgccgtcgccaatgaagagaaacacgtatttgggggctttgacggtggagccggtggtggagagggactgaacctcggcggcaggcgtgggggtgggatcgggcgcggcggccgtgggattgccgcaggcagccagggccgtgcccagcgtcagggcggccgtggacagggccaggggacgcttccaattcattctgattcctccaaagttattttgatacgctcggtacgctgccatgatagcggatagattggggagtgcgctatcagcgtggtgtaaaacaagctaaactctttgtaagatatcgtaaaggaaaggtgaggcgcgggggttgacaagcggcggaaccggagtgataatcagagggcggaacgaaaaacacggcccggttggtagtccgggcgcggtccgggggagcgtcccgcccccgggaccgtcagtaacctgcctccttggttgtccgcgctccgcgcaagacctatatttaaggaggacaacttcatatggaatgcggctatgcgaggctgacggtctggtttgccgaccccttctgggtgggcgtgtatgagcgggaggcggaggggcgcctggaggtgtgccgccataccttcggcgccgagccgaaggacggagaggtttggcagtggctcctgtcggcgtggcggggcctggactttagtccagcggtagaggcgccccggcgtccatccggccgggagaatcccaagcggacccggcggcaggcgcggaaccgtccagagaaaaccggcgccggcacgaagtcccagcaggccctccagctccagcgggaggcgcgcagggtggaacgggcgcagcggcatcgccaaagggacgcggcggaggaggagcgcaggttccgcctccgccaggagaaaaagaaggagaagcgccgggggcactaacccccggcgcttcctatatcctccgcccgcataaaccgggccccggcgcatatcctgttcccgaggtgatggggttggtgggaattgtggcgctggaggagcgacggggccgccgcccggtggtgacggaggagcgggtgctgggcctgcgctgtctgcgggtgtcggtgccggtccgccccggtctgcgggaggacaggcggaagaggcgggcggagcagggggcggcggccctgtaccgtgcaggagtacggcgggcgctgacggcggaggattttcccgactggcccgcgctggagggacaggggctgcggagtgtggacccggagcccttctgccaggctatcgccgtccccctggccctggccgcgctccggcgggcgggcatactgcgggtgcgggccactgtggccctgtccggcccccgggtgagccggccgctgtttgctgcggcggcgcgcctgtgtccccaggtgcgccatctggtggtggatgtgcccggcgagggggaggaactggcggcgtggctgcgggaggagtatggcgcggcggtgctgcggcccggcggggcggcccccgacgtgaccctggccttcggcccgggcggggaggagaggggaacggtgctccggctgtacggccccgcgcccgggctggccggcctgcgccccatactggaggagggggggctgccgccggacctggccccccttccgctgctgtccctgttgtgggagtgcggccgcctgacagagggacagatccggattcatgccacatgatgggaaataattgacttgacagaaggtgggaaactacctataatatcgtattaacgtggcgtaatgtttctgttgagatttcagaagaggcctggttgaggccttttgaccgataaggaagaagcaaaaaagaaaggtgtgcgcatacggcaatggcgaaagaatttaagctgagcgcggagcgcttggaggagctcaagcaggagctcaactatctgaagaccgtccgggagaaggaggtcgccgaccagatcaaggaggcccgctccttcggcgacctgtccgagaacagtgagtacgacgaggccaagaacgagcagggcaagctctactcccgcatcgcggaggtggagaacatcctggccaactatgtggtcatcgaggagcatgagaccgaccccaattccgtccgcctgggctccaaggtcaaggtactggatctggagttcgaggaggaggagagctaccaggtggtgggctcccaggaggccgaccccatgaatggccgtatctccgaggactcccccttcggcaaggccctgctgggcaacgcagtgggtgacgaggttcaggtggaggcccccgccggcgtactgaggtaccgtattttagagattcaaaagtaaggagcagagtcatgagcacagaagagagaagcgtcaaccagcccgaggagcagccgtccctgtccgaacagcgcctgatccgccgcgccaagctcaaggagctgcaggacgcgggccaggaccccttccagatcaccaaatttgtggtgaagcaccactccgccgacattaaggagggctttgaggacctggagggcgctatgacctccgtggccggccgcatcatgtccaagcgcggcatgggcaaagccgtgttctgcgatctgcaggacggcaagggccgcatccagctctacgtccgcgtggacgagctgggcgaggaggccttcgccaagttcaaaaagaccgacatcggcgacatcgtgggcgtggaaggcgaggtctttaagaccaagcggggcgagatctccgtcaaggcccacaaggtgacgcttctctccaagtccctccagcctctgcccgagaaattccacggcctgaccgacaaggagatgcgctaccgccagcgctatgtggatctgatcatgaacgaggacgtgcgccgtgccttccgtatccgcaccgccttcatcaagcatatgcgccggtatctggacgagcgggactacctggaggtggagacccctgtcctcaacaccatctccggcggcgccaccgcccggcccttcatcacccaccacaacaccctggacatcgacatgtatatgcgcatcgccaccgagctgaacctgaagcggctcactgtgggcggctttgagcgggtgtatgagatcggccgcatcttccgcaacgagggcatggatcccaagcacaacccggagttcaccaccatcgagctctatgaggcctatgccgacttccacgacatgatggacattgccgagggggttctctccaccgctgccaaggagatcctgggctcctatcgtgtgacttggctgggcaacgagattgacctgactcccggctggaagcgcatgaccatgatcgacgccgtccgggagtatgtgggcgtggactttgaggccatctccgacgacgaggaggcctgcaaggccgccgaggccaagggcatcgatctggagggctgcgagcgcacctggggcaccgccctgtacgaggcctttgaccagcgggtggaggagaagctgatccagcccaccttcatcaccatgtatccggtggaggtgtccccgctgaccaagcgctcccccaaggatccccgcctcaccgagcgcttcgagctgtttatcaaccactgtgagtttgccaacgccttctccgagctcaacgatcccatcgaccagcgcggccgcttcgagcacgagctggccctgcgtgagatgggcaacgacgaggccggcatgatggacgaggatttcatcaacgccctggagtacggcctgccccccacgggcggcatgggtatcggcatcgaccgctgcgtgatgctgctcaccgactccgactccatccgcgacgtgatcctcttccccaccatgaaaccccttggggactaattctctaaaaacacacgatatagagtgatttcaatagaaattcacactatatattgtagttttgagaacggcagattttattttaccccagcgttaccccatttgccgaaaataccccagagaatggggtagaatgaaaagatgaaatctgactgaatatagggagttggcttttatagctggccccctattttttcataaaacaagggtacagaaatccgaaaaggaaatctgtaccctatttttttcgtttgtgccgcccaggatagctcaggaggggcgattgtgagtttagagtatagttttacccctaaagactttcgacgctctgagagccgtctacgggcttttatttaggcttatcaaatctggtgcatttgcaatggccgtatgggtcgctgtgtcgtagccaatagctgcttacttctactgtgcgcccgcagttttggcaaaggcatttccacctggtttcgttgccggcgattctatcattttttacaggctcgatcaccttgaggaaaccaaaggtttggcctgtaaggtcatgtttgagttggaactgggagcagccacatgatttggtctttcctcttctgagactttctgaaaggacagaaactgtattaccgcattcacacttgcaaatccactttgcttttccgctttcagttgcaatatctttctgtattacagtaagtttaccgaatactttaccagttaaatctacaagtgtggaagattgcttatgtcgcaaacaaccacaagattttgtaccattttctttgagtaaattagtagaagatacgacaacggtattcccacactgacactggcaaagccacatgggacgaccaggcttatgatcgtctactcttttaatcacggtcaacataccaaatgttcggtttgataaatctatgagctttcccataagacaccacctgattaagatatctttattttcccatcaagatttgcgaacgattgtttctttacttctttcgtcgcttctgcataaatgttcatcgtggtttcaatatctgcgtgtcccataatttcttggatagctttgatattgctttcaacttcacaatatctggtgcagaaagtgtggcgtaaattgtgtgcagagaagtggcggatcagcgtcggctctctaccctccatatctgcctttatggtttcatcttcgatatacgcagcgcaaatcctatcaatagctcgatttacattgtgaggggatagggggtcgccataacggttctgaaaaatgaaccctgtatagccatcaacaacagattcattgaatccaatgatctcttgttttttccattcttcctggagcgcttcttttacctctgtaagcatagggatgattcgtatgccggcatcagtttttggcgtttcgatgtgaaatcttgcttttttctccccttcatacttccgataaaccatgttgtggttgatggagatgatttcgtcatcgaaatcgcagtcttcccatcgtagtccgatcagctcaccgatacggcatccagtcccaaggagcatggtaaagagcgggagccagtgattataaatcttgctatttttgatatagtcgataaatgctgcctgctcttcttttgtaagtgcgtggcgttttggctttgcccagttgttgcttttcttgatctctgccatagcgccggctgctggattgatacggatataaccatcacggacagccagcgtaaaaacaggatggataagagtatgaatgatctccattgaatttggcttgaaacccaattctctaattaacttgttatagtaagccttaacatctgaaaactttatgcttgaaatcttccttttgccgatatcgttccgcacatatttcttatacatatatagataatttgcgcgggtagattgttttagctctggtttgttagacatatagagatcgaaaaggtcgttcaaggtggctttgttttcaacagcggctttgataccatcctcaaggtctcttatgatttttctttccttttctctaaggcatagatcgtccttgcaaccaggggggaggcggtctgttggtacaagtctggggctgtagacatctcttctcacgccatcagcatccgtataacgaaatctgtagctaccgtctttccgctgagattcaccgtctttaaggatgcgccctttactgtctgtgcgtttttggcctgccacgattacacccccccctttttttcgtaagtgtggagaaaataaattcacttatcaattacatcataaagcaaagagtgaaattcgtcaaggagtaaaatcgctgaaaagttacttttgaaactttgcgttgattttcttcggaatttagtttacaattaagaaaagcgatgggaggatttaggcatgatgacagaaaagattcggatcgctctgatcaaacacaatatgagcgtgaaagaccttgctgcctctattggatgcacctcccaaaatttgagcggtaaatttaagcgagataatttcagcgaaaaagagctggccgaaattgcagatgcgatgggatatcgattcgagggtaagtttattgataaagaaactggggaagagatctaagcatagaaacaaatgttcgattcatagtgatttttaacggggtgcaacgcaccccgtttttttgttagttactgtttcttttctgggaaatcgcagataatataccgatagcaccccatcatggagcaatcttggctaacagcgcatccaacatcattcgtatgcttttcttgttcgtcatgcaatttaatcaattctttttgaaaaagttgatatgcgtttttcgatttgcacttattcaattcttcaaatacttctttggcgtattcttttatcgaactcatagccagtcctctctcttgacaatcattgagtagatctatttttagaccgagaatgattgctgggaatgcgatcccacaacacaatataactaaaatagattctaatgtacgaagcatatttcacgattgaagcgcaaagccaatgttgatagatgtaccaggctccagggacgggaacaggctgttgtcgatatccatgagccagccatcctgtttgttcccaacaccgacaatatcactgctaccgatcttctccacatactctgcctttgggataatgagcttgattgcctttaacgcctcaatctccttgtctgtgagttttggtcttctgatgatatgctctgggtgattgataatgtcgtagatcgcatcatcacttgtctgaccgccccatttcaaaatgccgtcagagttgatatgatattctccattgtaccctttgatgcggaagatctctccgacatttacaccaatgatttcacaaatccgtggttgtttatttgaatcataattcataaatttaatccgcctttcattccactgtttcaattcctggcatgtatcatggcatgattgtatgctggttgaagtcatagatccccagccatggtcacactctctacatggggactcgtctctaaagatatactctggtttgcttgccggacagtcattgcaggaaagcccctcgtatactccgcagccgtcggatttatagcactgcattagatatcgcctcacatatttaagatttctctgctatgactttcttgccacccaggatatctccagtagcaatataggcattgatgattgcatggttgtttttgattgagtagttcaactttaccagagtagcacatacagtttttcctttgaaacccgtattgatctgcgttttcatcatgcaacccaagcaaatctaagtcatatgaggaaatacacccacattgaagagtttccgttaatccaggctctgcacacgactcaatccggatttcacctaaccgacttgagtttgaaaagtaggtttttacatctcgaagcatctggtcaacttgggagatctgctgtttatctggagcaaagccgttttccccgtagggtagaggtaggccggcattcttaaatctatttctgacatgagggtacatatcaatcaaactgattcggaatctgctaaacccacagtcgataaatgttagaaatacattttttgccgtttcaatacctttctttgtagggatgattgggtcaatcctaataacaattttgctttttgggaacccaccatcgacaagtgcatctatggcaccaaattcatcatatggctctgggacaaatggttccaaaacagaatgaccaaagccagtgaatgttgtatggatgatcaccatatccttatatttgagtgctgcgtcgtaaaaatctggtgagacacattttgttataagaactgcgccgtcaacctggttcattttacttgtccaggagaggtcgagtcctgcatcaccagcctcggttatcccgattttgtattgtgccactttgtaatcaccgtcctaactgctcaaaatagaatttgactggatgtggtgtaggagtaaccaagccaaaacggacagcgtttttatatgtaacattgtcacgcatgagaactgctggcatattttctaccattttacggaatccctctaaagtagatctgcttttatagtggttgcaactcctacaggcagggagcatattatccagagtatcttccccttgttctgaccaaccatttatcggtataacatggtcaacctgcatatctttgtattccagtttgcacccgcaataagcgcagcgcccatttgtctttttatagatcgacatgcgctcatctttggttagttttcgacgttggttcattcttcttcctctataatcccgttttctgagattttcatggaatcatcgcatgtgaatttgatgatattcccactgtcatctgattcaaacgcaataatttcaacctttgcttttggaaattctaaaacacctgatatatgtgttttatacgcccctttaccaagtggatgttcttggtcgatacaacctatatttacccgaacataaaatgtcccatcgctatttggacttgcatatatttcttgtactccgttaatattcattttctaccaccaaattctttaatagcccatggagatattttatgtaagatgttatttttcttcacataagccccatagatacatttgtcatctctttctatacagatctcaccctctaacacggaatccatatcaataagctcaatagggtgcgcacatggatgtccgttttcgtcacgccaccacccgccgatatatccgtcatacattttcttgagcgagcggtattttgggtggaatgcctcaagaaaaagccgcttataaaacttgaggcggagcgggtcgtatgaattgcagatatggatgaagtcgagatagtatttttcgcgcgccgcctcgaactccatcatatccatatagtttggaaactccattatttcacctcaaaatctttgagttgcgatcttaaactgaaaacaacccatgttcaaccatatcataaggatcattatcccacgataactgtattgggcaatccgaaataggggtacatattgcccgactattcaacttatagcgcatgatttttgaccagtgctttttgtacttatcccattcttcgtctgaagagtagatcgttacatgcggagggaggaattcatctgctaccttccaatagccatccgcatatcctggagttactctgaccggcagtttttcatgcgcccatatctggcctgtttcgtcacagaccagatagcgcaatttccaggatcgaagtttgtctatgttgaatttcatggcgttgaattagcgatctcagatagctttatggattgctctttctgtagtgattgaaatgcgtttttgcgcagatagatcgtcttcccatcaacttttaatgtgaccatatcagctacttttcgtagctctccatctccaacgacatccagcaagttctttgcgctgtcgatttcatgctgtgtaaaatgagtttttctgacgattcgatctgggaagttgataatctggcttaaagcttctgccggtaggctaccatcgtcgcttacaatattcccattttcgtctattcggcagattcgcgttatcatcgtagaatgggatgtatatgtaatgctgaatttctctccgacttcaacaccaagcacattacaaatccttggtttcaccatatcgttatctgacctttcattatcggtgttgttttgcgtcaatgtggtcataatttcataccccataagataagcggctttatacgaatgggcaacaatccatttcatgctacacactcgcaacccctcgtttactccgttaagattacagtccgcacattggcaaggacacttgaacgcttcccatgcactgatgatatccgggtattcatttccgttcttatctacaaaagtaatttcaaccattgttgtagccctcgataatttcatccagtgtgacaacctcgccgtctttgagtgacgggaaccagtcagcgtcaataacagggttgactacatcgagtcggacacccagtaccccctgtgataccaccttgcactctgggaaaagcactcgaatagcctttgctctctccgcctcctgctcggtaaatcgtggctttcggataatgtgctcaggataatctaatgtccgtagcaaagcagatgtagaaccagaaacattcaaagggcttgtggaaaatgtgccgtcatccataatccaaaactctacatctccgaaccccttgatgtaaaaactttctcctggctcaacccccaacacctcgcagattttaggcttgtccatattgtcgcataggattcgctcgttgccctcttcaaaatacttttcccactgctctgtagtggagtctatgttgtttatgtcgatatcatcgtcccattctactttagcgcccaccttttcatccgcaaaatgagtaacacagcttattgagatcccatccagagcatcgtctttaataagacacttgatttcgtttatggaaaggttttcttccagatcgcatatatacaatgtcattttataaagttgtgccaaagccatcactccttgtccatctttgcaccgcagttagggcaatgtttcggctcccaatcactccatatatccgcgtctaaccccttgaatttatcttcaccacatataggacaaattgggttccctggttcccatctcccatgcctcacctccaccacatcggaggtaggggtgtcccacagcgcactgtaaaaatccatcatggacttgcactcgtgatccaggttgccaattacattttttatcgcagaaatagcgacatcccgtttgatgtactcactcacttcgcaagacatcatctctttaggacgaacaacatcgggttgctcacctattagatcgagcacatcttttagacaaacgagcctgttttcattcccgtatatatctgttaggttatcctttaaggcaccagcatcaatcggtttcattcgtgttcaaagcccccttaaccaacattccaattttatttctcaagtcctgccacgcttctttggtaagtggcctggagcagtttgggcagtatggtatttctggcttttcaccatacgcccatctgcttaaagataggccgaaagtagagtccttactaatggatagcccattcaaagcctttcctttgcataattcacagccaggccacatctgctccaattgtttgtattctggaactgcatggcataattcatcaattttggatttcagatctttgttttctttaaccgacttggcatagtcgcagctatgatcacaattcttggtatagtgcttcccaaacctaagccagcaataatcaacacatggatttatgatatcaccatctttcacttaaaacacagaattcattgatctgtatcgacctcaaatgtggttgtgaatgggcatttatgctcacaaaatcttatctgaccatcttgtttacatattccgcatccttcaccatatttattcataatccactgactatcatcccagtatttacaatttccgcaaattcccattttatctccgttttacatttctgctggagaatcatagttagaaaggtctgcaagcttaagcctaattccagttattgtgatagtcggattatcttggttataccaattaagaaccgatatatctaagtctgtctctggatatacaaccaacaattttccttcctctaaagcaattcttgaagcccaggtaaacacaccctctattgcccctttacatagtggggaaaaattgatggcgttagaaaaagcttgttgtatatcaatagattctttgtcttttagtacgttgattaaaaggcttgcaacttctttatatttctttacactcatatagcgaccaattgtttcagcatcagtcattatttatgtacctccaattgatttctataggcatatcttgtacaatacgcaattcgtttgttgctccaatctggatgcttgtgccttatacaaaagaagatgatgctccgcttgttactgagtttcttcattgagcttgctttcaaaatattcgatggcaaggctatacgcctttttctgtttgtcaaaatcttcttgggtcacatccttgagctgggatagctgctctttgaaaaggatattttgcctatggagctgaattgtattttgagtaatcctgaccacctgagtaattaccaggatcgtcaccatgattgttaggtaaatgtccatatgtcctccagtaatttctttttagttccgatatttcttgatctgtaagcgtcttgtttgatgcgaacacaaaataatcattgcagcgattttggcaagccacacactcacagcggtgcgggttgcttgtttcatttacacgaaatgggcaattgctgtagcaatccatgtcaatcatcctctcgctgttcccaatcgatcctttgtccgcattgtccgcagaagttcatctcattcccatcttcattatgaagaaactcaccgcttccgcagcatgggcaggcaatgatggaagtatcgccgtctggatatggactcattggctcatctcggtttgagagtgttttcatagacgagatatcaaataaaacctggtctaacagccaggaggccgtcttactgcctctgataatgtccgtatcgatcagctttataatcccgaacagctcattgccgtcaatcggtcttacttccattttgaacctccgttattgccgtatcatcttctggtacaaatgggtggtagacgatctgctctggactactttcccagctccatccgcaagacgggcaatccttacgggagattggcggtaaagtgcaaataacactgttcatcaacggcgctccgcactttgggcatgtttcaaccacgatcatgatttctcacctctcttgtaaacgccagcctgagaaacaggcttcatgttacatttatacatgtcctcgaagaaaacatcggatgggttttgaatcaggtaggcaaggcgctctccaaagaacacgctgtagaatccctcataagcgtcctcgacaacagtggtgtaggccgctgtcattgcctgccctccaatcccgccaaacccaagagctgtgctgccccatacttgagggaaaacccgtagcgaaaggtctgtatatttgtaatcaaccccaagagactttacggcgttgatatgccgctctgcaatgagcgggagacaaggtagttcacgcatcaacataatcttcatcctccaaaacagctttgttccaagtttcgattgcacatttcagcgcacggtctgggagagcctttccctcaactactttcaggtgcgacctgccgaaaattggcttgcactttatggtagcccaacaaccgtgtcccgcaatacctttgagagacacggctggtgttcttccacaaaccgggcaggcgagaatggtatcttcaacctgagattgcatttacatatgccctcactttctctacattccagaatacccgcttgccaaactggatacgggcttctgccagctcaccgatttgcacggcagatcttcggccacacccaagcatggcctgaagatcattcgtatttaccgctattttttcgcttgtctttatattagaaaattgctttgttgcgttcatacattccctcctaccacttcttccagtcgagtaggcttgaaattaacctgttgaataggaaatcccatcaaaaatctggatggggattggactgcatagcataggatagagaatgtcatcccgaatttctatccatgcgtctccccaagtcaattcttcttggacggctacaaaatcagctcgtctgccacgtgagttttcactcaaccctctaacacagagaacctggactccatcaccgaggtacaaccgttcgttttttcttgagtacattaaactctctggcgaaacgaagcgaaaacgcttaatatattgctccaacgcatcgtctgttttataaaagactaagattttgaatcctatatgaatcacctccaagttgattaactaagcccttagaaatcatcttcttcgttcttgctgacatacatacagaggctgtttccatcgtcctggatcacgagagcgcaaagccgtccgccgtacacacaagctgcatcaatgcagatgtcgccagtatcaacggtatacgccctaccagtcttacttggagtatggccgaatacaacttgcttttctcgttcctctgtatcggttgcgatccaatctcttccccaaagtagatcgtctggggaattatctttcaataggggataggtaaagccggcgtgacagaagatgatttctggtgtctcgtacaccaaaggcaaggtttcaaaccaggagatcgcattgccgatatcttcaccattctgctcaaaactgaactctgtaaatcttccgccatttctgtaccacaatgggtattctccatggcggtaagcatcaatcgccatctgctcatggtttcctcgcagacagaccactttatccttgccaagctgctgctgtaatttcatcaacatatttactacttcgcaactgaatctgccgcgatcaatatagtcgccaacaaacacaagcgtatcagtttgacttgagtaggataccatgcggagcaggtctttcagtgtatgtaagcatccatgaatatctccaatcgccaccagccgatccattatctcacctctttgaaaattttacttggatgtttttggggaatgacttttacatcaataccgagattcttcaaaagctcaatataatattctgaatgaaagttcccctctaaaacggagactccttttacggtttttgaaatcaaggttgttgtatcgtcaattttgtctctctttacaaataggcttggcacaatatcaaatggatgccccaaaatagagcagaacccattgtctgtgatgatcgtgcagccgtcgatattcgggatcagaatcatgaatccatcaccagccgatctgtatagaagaactctgtatgactccctacgtcgaaacaggtcattggcgtttcaccaacctttgtattccaattccgcacataatagatgtgaaaattgcgctcgtcgcagaattttttgatatgctccatggcttctttgcgagcttcttttacggaaaggttatcgctgatttttgcaacctcacgcatcttgccattgctaccctgaaaaaataatgtcatgccgcagcctcactctcttctatctctgggagcttgtagattgttacatccatatcgtcaaagtatgtgcaaatcatattgtagacgattttccagttgccttttgcaagaccacatccgaatttatatggaaacgccaaagatttatcgtggtactgggttctgatttggttgaaagcatttgtaagcgccgtatagttggtaaaggttttaccagcggttcgcccataatcaagctgcccaaacacattcgcaattatcttgttaggcacaactggaatgaactgcaccttgccaagcaagtcaaatggagtggatttgcggcagaattcatggtactctgttttcacctcaggccaccgcgtatagatcgcctttgccaaaccggaacccattgcacttctgcaatttacctgctgaacaataatgtcttctgctgcgttcaacaaatcaccaacaacaatttttaccatttcacaccaccttatctatcgaaaaataactaccatgctcggaaacggggctgagttctttccgtctccaaactttaatctcccacggagaaagcggatctcaacattgggctttttgtaaatgtaatcatgaaaatatgccgtgtctgtacgcgctggaattaacatgacaactgttgtatctggccttttggcctcctctgagcatttcttcacccaatccttgattgctctcccatatggaggattacaaaacacggtctgcccccccccagcattgttcaagtccgttgtcccgctctgtataatagcggtcacatttgtggttggactcgtctgcacaggggtcgagggtgaagtggaactctgaattcagcttgtcatagaagtcctgcggcgttgcccagtccattttcttggaagaaaacatgacctctgtattcataaaccacctctggattgattaactatttgctttaataagctcctgtagcgttcttggcgtatatcccatatacggcatcatacagccgacattgatgatattcccacaattatggctattcatcgttctgctgctctttagctcttccctccacttattgagaaagccattttcccgtgtggtatggacatgcccgcagagcatataacagtctggattataagaggatttatagagaaggatagggtagtggcacataatcacatgcttgccattgtccgtgatttccttatactccttaatatcctggaacatcttcttcagcccagaagacatactcttcaaatcgtgattcccacgaattagaaccttatccccatttaactgggggacaatccgtttccactcaggctccgtaccccagcagaaatcgccaagaataaaggttgtgtctttttcggtgacaacgccattccaattgtcgatcagcacttcctccatctgctttgtatcggcaaatggtctgccgtcaaatcggatgacattggcatgtccgaaatgtaaatcgctgatgtatcggttcattctcgtctccttgtacgatatcgtttgatgcggatatcaagccctttttctttggcggtgtctatcatatgtttggttcctcttgagctgccgtcccaaaacgcaaccaaagcgtctgcgtactccgccatttttacatttcgcttaaagccggctgatttgccatctaaatcccaatcggctggaaaatagatgacttgatacccatgttcttttgcatatcgctcgccaagccggtctgcgccgcgagccataccgcacactacctggatatcgtcgttgatgtttttgaagagataatctaagctgttggagagaccctcatagttattaaagtctctcccgccagcaacaattactttgaacataccatcctgctccagtcacaaagggcttacatatagttttggaagttgctttctgccatggggcatcccctgcatagttcttcaggatacgagccaccctcggtctgcatcccatacccacggttgcagctcacatcctgcatgtccccataccagcgctcagtaattgtccctccacacgcaccgtcgtagcagttttccattacgccacaccatccaatctcaaggttgctacatctgcccaactcattccatagtatttgcttttcttattgtcgcaaaaaccattatccatcccgatatagtgcctgttctctaatttagctgcaattagagacgacccagatccgcaacaattgtccaatactacccccccccacattggtatatgtgcgtatagcatatcgacacaagtcaataggtttttcagttgaactaattgctgtggatggatgaggctttgggaatttccaaatagaagttgggtatttcatatcactcttattttccacaaccttataagacccgtaaatgcgattagaagatatttcttctattgaagcaccaattgctttccccttactatggcttggtagccctttcgtcatctgaggattgtatataggctgtgatttgtagaataccataatatcttcatgctctctcaacggcattcttttagcgtttagaaatccagtcttgagaactttgtcccaaatgatgttatacctatgtagtttttcatttgatagcatcatttttgcggtgaacttatcctgaccaaaaagcaatattgcaccatttggctttataatacgttcatactgttgccataactttgtcggatcgatcatcagatcccatttattctttgtaatcccatatggtagatcgcatagaatcatatcaattgtttcgtctggtatatcttgcataccgattaaacaatcgatatttaatacgaagtccagtttcaattgcgattcccctcaattccttcatttagtttttagcgccaaactcaacgacattcggaacactggtggagccgaaacctccgttgcggattccatcggctgcgtcgtcataagaaatcccgtaggggagaaggataccctggataaagctgcctccctttgcaatgaacacattcttcttctgccggctgtcgttgattacctttgcgaaaatgtgtccctcgttatcggagtggaaataatcggagtcgattacgccaacagtgttgttcaactggagccgatatttgaaaccaagtccgcttttcggcatacaggccaaccaccagcccggatcaatttcgacacggatgccggtagggactttcatctctacgccagggacaagactcatatcaattggagcatagaagtcatacccagcagatccgaccgttgcccttgtagggactttgatttcatcataaatccccttaacacattccttggacggcttatcgcagttctcaaaaaatgtgtcacaaaaatcgttgtagaattggtcaaaagacaccttgctaaattttgctactcgattcatttgttgtcgtctgcctccttgattttggtgtatagcccgcaatggcatttgccctcttccatctccaggaagtctttgcacatgcactttgtatctggtgttttgacaatcacacatgggcaatacccatcgttttctctcagtttttctctcatttctttgacaaactctttgtctggatttatcttaatgatcatgcgtaactcccttatgaaatctgctctgcgtactgattatctgaggaaagagtgataccaagcacatcatcgtatctatgcggtttgtctggaataaacctgccaaacttaacaatgatattttcatatttctccagacgttcaagtgaggatcgtacctcgtttggataatatcccgtgtaaataacgatgggagagatatcgccatttgaacgaaacagcctgatcaaatcctcaacttcatcaatctgcaagaaaggttccataccgccaatgacaaccgctttggtgattggattgtttgcaaaatgctgataaatgactgagttaggaatgtcttttgatggtgcctgggcaagaggtgcgttttggcacacctcaatacccaggttcgactcagtacagcacttaaagtcacaaaaacaggtgttaataaacatggcggggagtttgaagttggtgaaatcctcttcaataatcccttttacccgcatcacatgacctcgctttttgtaagaacatcgtaccacttgcgctggttgaactcctgcttgcggatcgcctggtagctgctcacgggggtatagaagcccacgacgcgagcataagtatctgcaattggctttccgcaggtggggcatgttttagtccccataaaggcgtgtttgtcagcacacacagaaatctttgtggtgaacgcaaagtaaattacgccctggcttgccacgtagttgagcatatcccaggcggcttcctcattcgggaaccggctctcaatatcaatatgggcaatgcagccaccaccacatttcttgtcgaacagacttccaagccggcacttctcttgaatcgtgcatttctccatcagtggaatccactgattgctgtagataaaatacttgttctgctcaaagagaagattgtccgctgcacaaatgacaccggcacaattttcagccggaatcatctccagattgaatgtgaaatcacactcaaagttgtcctttacctcgttgattgtatcaagaatctcagtggcgaactcaacagcctcatcagaatacgatttgtttcccatttcgtcctcgtcaatcaggctaaacaaatccataacctcatacattccgatgccgccgatagtacagaactgcttatccagctccacagccccgtcctgataatttggcaaaagtcccttttcaatgtttcgcttgatcacatggcgcatggagtacagagccttacagtcaagcagcacacgatctctaaggatgtcaaggtatttcttcttgttgagcttgctttcataggcgatgcgcaccaggttaatggtgctgacgcggcaggaacccacgctcagagcggtgccgccgatagaattgataaaggcatccagcttcttggtgtcgctgagtagtcggcagcagttactcaaaataccgatgttatcgctgacgaagaaattggagtcagaccacttgatattatgattgctacaccagcgggcaaactcttcgtcctggaacttcccgtctttgtaatagagcgaataggtgagaaccgggtaggtgaacatgttctcttcccgaatttcactcacgacctccatgaacaccttttggaactcaataaagtcctcaatgtggtcaatggcaagctgtccgtccgggaactccactccgccgaacagggactcaagatatggacggtcaaagatagaaacattggtaaaggcagactgatcaatccgtaagaacggctggttcaaacggtagatgaacttctggaattgctggcgggcataatagcttgggttcttcatgtaatagccgccatccacatccttcttccagaaataccacgcccagatcaacacattcgggaggccaactgcgccggactgacggttggacaggaaagatacaaactcgatcacatcgtcaaaataggtggtgaggtgcttcggtgcctggtgattatagtggtcgaggaagaacaatccctccgttgccaatctggtcaggtcgtttgcccagcaataggggaaataactcgcggttgtggaatcgttcaaataaaaccccttgctgaattcctgctccagccactgcttagcggtgcgcaagccccactgcttcttgatagtgaggaaaatcttgttcaggccgaacagcttatcttcgctctttgccttttcggtcataaagctacggatgtccttgtggtttgcattcgcattcggatcaatggacgcatcggccagggtgtccttatcaacaaaattgtcaatgaactcgctgaagtcgagctgactggggtggactccattgatatattcaaaatcctcaccgtactttttctttaggtcttctaagcagcgctcaaaatccttagaaagctttagcgtaatatccatatgtcatcactccccctgttcgtttacccactgaactgcctttgaaaaatccatcatatccccgtatacactcagaactggaacagacataattccaagagcaagcatttcatctacatcagtacactttgtaaatgagatatttttctcatttaattttctttccaaaattccacacttgggacaacctgttgaataaagtacaatcatacgctttctacatctactcctttcaaaactctgtcgatttcatcgtctgcggaaagaagctccgcaaaatcagaaacgacttcgtaaatttcatcccaggtttctacgcgaaccatgccggccgctaaatcgttgtagctgcggttgtgcggacggtcaaacagaataggcagatcgcatgaggttgtttcaaggttgtgcgtcccatcgtcgatcatgatatccccgttgacaaggcttttatcgcttgcaacaatcacatcttcccattttagatacgggtacatttccagtagtcgtttgatctttgctggtacggtcgcgtaatgcgatgcagttacaatacgaatggtatgtccgtcgtcaatcagccttttcaatacctcctgagcgttctgcatgggggagattttctcccaaaactcggttgtattcagcggagagaagaggtcatccttagtgagttgcgggaagaattttgcaattctccaatcggtaatatcttcttcccgcagggacgagccgcactttttgtttagctcgtttacccagcactccacaaggttttccaaaacatcgtccatatcaaccaatatggtcagtttcttcatgcgcacactccgtatctatttgcgatcaggccgcaaaccttattgtaaagatcatctaatgtgccgtcgttcacgattagaaaatctgggataacattgtcaagagcagtctcagatgggtggctctgctgctccgcagtcaacgggctttcaaaattctcccgtctgattctgatgtggatcacatcaagcccagcctgctttagagagtcaatttcgtttggaaatctgctgtctggaatcagtacaaaatcccactcagaatggaacatggtaagcatatccttgatgaagtcaacccagtaatttgggcgctgggtgcgaatgatatctgtgcctactttttggagcagacttcttccgtaatcgtccttttctccgttccagttgaagaaggtcttgcacacatattttagaaggtctccataatgggcaatcaaaacagagtaccccatgtcctccagcacagtcttcatcatgccggcagttgtgtccttaccatgctgtgccttaccggaaatacaaactactttcatttaggcaacctcgcattcaatgtcgtcaaaaagcacggggatcttatttttgaactcctggagcagcatcatagcgatctctctcatctgggggtgagccgcaacaggcgttctaagtttgaagaaatgccgccattcacgcatattcatggtgatacagatctcagttttggttgagttattcagaaccgatcttgcaatctggggagacgcaccaagctcaatcatacggttgtaatggcgctccgcatcagcgcatcccataagccactcattgtaaatggctgcggtggtttcagcatcaagatttttcatcttgggatcaagctccataccgcccttgagatcgatataggtcacttcatttccaaacttatccttggaatagttgcagtatcttgtactctcctgtgcatagcttgcgatacggtgacgaacttcttcatgagaaacaccacggtcattgatcagacggacagtgatgttgtaatgctcgataaccgcctcatgccctctcttgataatgcctctgacaaaagattcacaggatgtatctgtaatcttgtcttcgctcttgtagcaggttcttcccaccgcctcaatcgtcttcagaatctgttctgaatcaatcggcgtgataatctcaaaactcggcttaattactttcatcgcataacctccataaaatagattaactaattgcttagatagcagaaataagttgtggttccaagcacttcatcgtagtattcgtaatacactccatctccttgtgggaagtttgcctggaacacaacattttcagggagaacgctgccctgctccaagagctgacgtgcgttttcgatggttctttcgtctggcgtgttattgattgcgccagtccatgttggagaatactggccttttgcatagatcacatcgtataaagtatcggggaagagtgggtgctgcattctattgagaacaacactgccaacatagagctgcatttcatccgatacccagcttgctcccatttctgcggtaattagtcttgcgagcaaatccaggtcttcctctgtatatggaacgacgggagcgctcacatctacactttcttcttcaggctggatttcggcttcctctgtaactgccggagcgctcgccaaatatggaggcggaataatcaccgtagcaggagttgtttcctttgctgatacttcattggcaactgggtaaacaaaagatgagagaagaacaatcaccaaagccatgcaaagaaccgatacggccttaaagataaaattatgtttatgtgtcatttccgttatatcctttcttgctttatgcaatcaaatcataatcgagcaaataccaataaccactcctattcttttctaattcctttgcgtagattatgtcgaatcgtttgatcggcgcttttgcgtacacggaagacctgatggtaagcctggacgctttcccgctcccaaccgatctggtctgtaccgcataaccccaaatcttgttgtcctttttgctggataatgggaacacatctgttatcaaaagttttcgtcgatcctcttttttgtttgtcgtcagatcgatatatcccataagctcgatttggttctgtattttgcatttcaaatccaggtctggtagatgaagtgatttaatcacatcctcacattcatccagtaggccggccatatccgtgatggtaaatgactttgcctctgtgccgtttttatttttgtctgtcgcatatttcgatacaacatcaagcatctgcccgctgatcttatccttttgcaccttttttgcagtgccatttttgaagaatgcgaatacggatgcaattctggatagttccgttgcattcccgaagtcaacaaagaaatcaattttgatcaggatatccctctgcctggtatcaatagatgtctcattgttcattagggtaagaagcgacataaaggttttcggatcactgcgttttgcgaggtcgtacagctcgttcgcaacagtgctattcatatacttaattgagttgataccttttgcgatcacatgacggtctttatcatacacatatctatcttttgaaatgccgtatcgagggggaacaatttgaatcccgtatagctcagcaagtgcgctgccgtttttgatatcgtcctcgttattggcgttgttcagatatgcggtaatgaactctgccggatagtagtagcgcagatacgcacacaaatatccaatcatgcaatagccaatggaatggttatatccgaactggtaagatgcgctgtcctcgatgatctgtaagaactccttcgcctcttcctcagcgatgttccttggctgggatgatttggagcagtatccctccaaaatatcaggcagagcggcttccagtctgtccttttgcttgcggccaatggcgcggcgtacattatcagcttcactgccggaaagcccacagatttgctgaaggaacttaattgtgtcctcctggtaaatcagatagccgaggttatctttcagaaggtcatcaatgataggggacgggttatggtgcggtttcctctggagaagttcgtcccgataagaagcaccagacggtctgatgcaggctgttaccagagacatatcgtaaatgctgtgcgtcttaaactttctcagactgtcaaatgcaaatgccgactcaaactggaaaataccgataggggagcgcagcatgtcattccaaacagcatcatcattccagttgatttcgtgagactttgggtaaggtttcccgatgagtgcataggtgtctttgatgatctcgatatttttcagaccgagaatatcatatttcaccaggccggcttcatgaacgcactccatatcaatctgtaggatctcttttccctcagacagaaatgttccgtagtgatcccgcagcgtaatggggcttgccacgatacctgctgggtgcatcgactgggaaattgcgacatccagtaacccatcgtaatagtaaaatacttctggatattggctccttgccttttcctcatcaagctcaaacaaatccttgatttcagtgtttactttaccaacccatgggtttttctgaaagattttttcgttttcttctttcaactttgaatactctttggtgaactgtttgaccagttcaatccttggaatattctcaaattgctttgagataattagtgttccgttttcatcaaagtgataaagttcacacccgtcaggttggttgccaaaacgaactgaagcgctattatcttttagaagctccagtgccttacgaaatcctctttcatctctctggtgctccttgttccactttacacccagcgcacggcaaatctcatcgatacagcctttcgatttgattgtgccgattgcaaggataaatgcggttttctcctgaccaaaccggttgataatgtacccatacactttgtcacggtcagatggggacacgtcaatatcgatatctccaatttctttacggtcttcgttgcaaaaacggctgaaaaccgtatgccaggtctctgggtttaagtccgtggtatttgtgacataggctacacgggagcctccacaggaaccgcgattgaaaccaattggaataccgtttgacttgcaccaggtaacaagctcagacatgaataacataaatccagacatatcgatcttatcaaaaacgcggcactcttctttgatagcgtccttgaaattctggatttgctctggggtgattgcaccctcatcaatttttgactggaggtttttgcgaatggtatcttcaaatacggccttatcttctgcggcattcccgtatagcttcgggtacttgaagctgatatccagttcaaatggctcaacagagtcggccatacggtttgtgttttctatcgcttcaagaaatacttgctctggtaatgcgccctgaattcggaacatctcaaccagttcatcgtaagtcttgtaggttaaatcaaaactatcctcgtccgcaaactcgatgtgctttgcgagctgcatgatacttctgcactctgccttatacgcatcgatgctatgggtgtctgttccggcaatcaaaggaataccgtattttttcgacatctctgcgaggtggcaattgtatgaaatctgctccccaaaattatgagcctgcacttccaaatagtcgtaatgcttcagtagcttttcatacataggatgacgaacactcattttattgagcggtgaggcgaggcaggcgctaattttaattacattgtctgagatgccaaggaactcttcaaaagtaattcttggcttgtaataaaaatggtcgtcacggtttgacaggctcaccaaattattgatttcaagaatgccgtcgtaattcttcgcaatcaaaattgtgtggtaattatctctcacctttttcttgccggattccatcatctcagcaagcgcttttttcgcatcctgttcgttcctgcctgactgcgcttctctccatagctcgtttgcgtctgggtactcataaagctgctcagtcaaatagcactcaacgccatggaggtacttgatcccagctttgtcacaggccatcttttttgcaacccactgatagatattgccatgctctgtaaacgcaattgcggtttggccgagctggacggcacgatcaatgtagtcttgaaattttgtcgcgctgtccagcaaagacaattcagaatggacatgataagcggtgtaatttttactcagaagactcgcctccctactaatgtccgtctactgtaccaaatacctcatcctcttcatcattcaattgttctggagggtaggggagaccgccaacataagggtgtttatcccatgagtagcggcgatccaggtcttcttccgatgtaaagaagcgtctggacggctgatcgtaatagacaccaacgctgcgcccctcataaccaagcattctgtctttcagaatgtcgatcagaacatcttctttgattggctttacacgccaaccggaaccatttagctttggctctccctgtttatccttatcagagacgcggtacaggctgatgatgcggtgagccaggtcgataatggcggagatgccctgcacatccatcttgttcagccggcgcatggtatcaattttgtggggatgaacgaccagaagaacgattacattgaacttaactgcaaacgcaatcagattcataatcaattcagactgcttattgtacttgttatcatcactacactccaaattgatagcggttaagttgtcgaggatcagaagctttgtcccgtactttctgacggaatcctccatggttttcagcaggtctgtcatacggttggatcgtccatcctcatagatatacagacgaccgcgatagaactcatctatttcacgctttgcctctggagaaaccttatagtaagtagcatcctgccaatgccgctcttcgatgtggcgctggcctgcaagcacagagttgagccagttttttgtttggaagtttggcagctcgccagaaaaaaggaatacatttttatcctgctccaacgactggcagataatttgattgataaaagagcttttgccagctccgttgatgccggtgatgatgttgagcgtcccctggaatagcttcatcagatatcggtcaagaggacggataccggttgtaataccgtcgatctggtctaagtccacatcctggatgtcggagaagtcaatcacaccaggaacaggactatccttggcgttcaagatgatctcaagaaccttttccttgccaagataatagagggcttcgttcagatcgttgacactgtactttttgccgttctccgcctcataaatcggtggcacttcggcaaccttggtgcgccaactgccgagacggtatacgacctctttctgcattttttgcccggcttcatcgttgtccgcacacacgataatgctgtcaaactgttcaagccagtcccaacattcttcgatccagtggaagttcccgctgccaagtggaacagaaactgcattggtgaagccggactcaattgcagatagacagtcaggctcgccctcgcagattaaaagcggagcggttacattgatgcggttcatgttaaaaagcaaattactggtatctgcgtttttctggcaccagcacttgttttcccctttatgtacctttctggatgggcgatacttcaccatggttaaaacatcattggtgtcgtagtagttccagacgatgttgccctcttcgtcctggcggacatccgcatagtcgagggtttgagggctgatacagcgccgcttgaagtattcatacaccttgcttttatcgccaagctgcacttcttttggatatctatactggtgttttgtttttactccaagctcaccaaagctgtacttgatcccagcgagatcgaacagtttttgacaagcctgaaggtaggtcatccccttgtaaataaatacatcaaggatgtcatagtttctggcgcaagcgccgaaacaatggaaagaaaatgttttccgattatatataaaagatgcgtggtcttcctgatggaaggggcaacaacacctcaaattctgttcatcaaaatcctgaatccccaactcctggacaataattttagcgttatcgtctccgagcctttctttcgcttcaaggatcgtatctcgatcaatttgcagatcccgtcacccctctcttcaggacatctgtttgtattcacagtctgcacatacatcgcagagataatggcaccgccaatagtctgggttggcattccagttatcatttactgtgattttttcaatttcttctttcgaccacaactcaatctctcgcattgtatctatacggaacggttcttgaatcattgtctgagatcggaaacagttaaattcaagcgcatctggatatttgccgtacaattctttgatagatgcagagtaaacatataactgccgtaggtagctatccagttccaaatccgattttgtaggagaagaacggtgtgagcgaggcttgagtaatcttgatttatgatcggtgatgataagtttcccattgtcttcactgaccaaatctataaacccagtccatggctttccagcgaaggagaagttcacattttgctctacgcccagaaccgtccttttggggaaagatagattatcaaggtaacgaaatccctgctcaaaatagttgtggtagattttttggtttggagcttttgatcttacattggaagaaaagtgggctacatagaaggttgaaagctcattcttcttcaatataccatctaagtacatttgcataatcaggtgtatgtaactaccaaactctgcaaaaaacccactcttctttttcagcggcctaccgtactcgtcccgatacaggtagctaagaaaccatctgtatgggcattcctcgaatgaagtaaggcgagaatagctccataccatatctgatatcgttaaatcatatcgaatagagcatcaccgccgacttattcacttagaacggcagattctcgtcgtcatcgtccgactcttcatctgccagtggagaggccggcttgctcttctgctgctttttcttggcaggctttccagcggacttgccgctgtccttggagccatcggccatctcgaagtcgaacatggcaaaattggtatactcgcggccagcctccttgtcatagcggtttgacacatcacaggaaccgatcttgatgcggcagcggccaccaccctccagcgcatcggagatcagattgatgtttttgtttgcgtcgccaaccatggagacaaagccgttgaaatcggtgacatactcatccgattccttatccttgcggctggtggagatacggattttggagaacttgctgccagtctccgtaatctcccacacggtcgcataagcacctgtatgaaaccccattacttactacctccatccttaattgggcattgctgttgcagctcttcgtagagacgcgccgcaacctgcgggtcagtcagataattcatgtagtcggcagtcggcttattgccattgcgcacatgtttctttaccagctccgtaagcgtcttgcgggcggcttcagagttatcatttgcgtccaaatagctatggacgtgggcatcgattttggtgacaatctgctttgtcactgccatatttgcctcgacctctgcctcttccttttggctgcggtaatagtccgggtcgtcctcaggggtagcgatctggaaatactgagtcaggaattgacgctgagcataggtaaagccgccgccctgcgcctgggacggatctgcctgttctccgcaacaagtccatggaacccgtctcgactccccgctgtccacatcgatccaggtaaaaatgatatcctgggaaacaacaaactcatgaacgacctcttggattacatcgccgttcttcgttgccttttgcttttcgtagtggtcaatcacaatcttctgcgatccatggacgcactcttcctcaagcagcaggccatacttatccatgccggctttcagtttagcaagaatttctacgatagacgcataggtgtaaccgtagcccttcttgctcttcttcactacatctacatacttgcgaagctcaaagagctttcggttcaagttcattgttgcattgttttcagacacttcgttcctccatcaaataggttgcttccatatctgcaaggtggagcagaacggcaaatgggcaagaatcgtaagccttgctgcaaccaaaatcaccgccttttacagcactgtcaaacccggacatatgccaacggattgcataaatctcttcgtccgtcaacttcatgtgacgaagaagaataatgacagacttttcaccatgtccaacagggaattggtcttctgccttataaaacggctctttatgccattgaccggttgcctcatccttgacatttttggtgcctactgcataatagtttgccttgcacaaatcatgaaacagggctgaaattgcaatggtttcttctgataccacaatctctggaaattgcttaactaaatcctttaaggcatcgtaaacattcagagaatgctccagaagaccgccctcatgattgccgtggaatctggtgctggctggggcatagtaaaagtctgtggtttcgatccaggccagcaaattttcaatgccatctcgtgaaatattctccctacagatagagagataccgctgttttagatcctcatttaccagggtttatcactcccataaatcttcgatattcttttgtctgtaacagttgtcgcaatacacttcgccagattttatcaccacatagccatccaatatggggttcccgcagtagtcacattgtttatacggaacatagttcccaccgcacacgggacatccagtgaaatgctcatagggcggagtgtcaaggccgtgtgtctcaacataatcctttggattttgaaacacacagccacactctacacatacgaaattactcgttctcttttacccgatagcccacgcggacacccatgctgtcgtcaccggcgagctgcttgatcatcttgtcaagcccaataacattgtgagcgggagaggggagagcggcagcaggctcttgctgatcaacctccttggccttcttctgcttcttcggcttctgctgagggcggaatgcgttcttgaactgcgccttgaagttcgcgcgggagccataagcctttctcatgcaggccatggcgtagccaaattcctcggagaacacatcgttgtcgcagcgcacgactgtcttatcgccgtcctcccagtacacaatggtggcaggaggattgaagataacctgagtcggcatcggaatcagggtacagggagccgtcttcaccacctctacaggggcaatgtgcagttctccaaagttaaaatcctcggccagatttcggatcagatccattttagtcataacttttactcctttttagattgattaactaattcctttggatggacttaaaattctggctatgtgtcagaattgcttaactaattcctattacagtataacaggttttcctaaaatgtcaagaggtttttctgggtttggggatttttctatcacgcaaatcccagttgtttgagctgtaattgtggggcaaattcttccgccgtcctggactctgcctcgtctggttttactgtttggataggacagatccacagcccccccccacaacacattcaataaaaccttttttcgttgcccgcttgattcttacaatgttctccaacttgttctctcacctcatatactgcgcaagggggattcccatgtatttgtgcgcggagcgttgggcaaaccaatataactttatttatctttgcttttcgcccctgcggatcaattacccccgataaaccgccaagaacaagtatcggggtggattgcttcacttgtcactttgttcatccttttatctgatatcttggcataaagtaatcagaagttgttacagcggcggcaacaccagatgtatcataaattctattcgataatgacggctgcttgccatttacctttgaattgatacataatgtttcgcatctcacttctgtactactttgtaccatcctgtttttgcaccccccccaccagcgtcagccttgatggtacgagaaattccgtcaccattgtaaactctgttggcatcaccgttatagtcgttgatatagccaatctgctggagatcaggttcctccccgatgggcgagggaagctcagcgcttttgtgcgtgtccagtttcgtaagagctttttcaaatgcgccgatacctgagaagaaagaaccgacaaccatatcatcgaaaagatacggcatcgcatcgtacaggttttccataatgtggagcagcacatctaccacgatgctgttgccggcctgtttgtagagctgggaagaagaacggtctttcccgttataaagattttcgttcattctggatttggcactttcaaaatcatggtcttcaaatcccataagccgccaacactcctttggggtcagctttcgcacacgaaacccagggcggattgcgattggtgtttgcccgccgcccattccagcggcgctgtttacgcatggacaaataccatcggaacgcggggtttggtgcctttgtaacccgccaagcattgtaatattatcgtatgtctcaattagtttcgtcccattacctggagcgtcatttttgaaatttggcataacagtccctatacaagtctgatctgacttgatcctcctattgtaatcatcgtaaattataatgtgtggctccaaattacccccccccatacaggtcaaggcgggagatataccgcttgggtcgtacacgcgtccacgctgcggattatctatctttgagccttttgtccaattgccaacttgcaatatcttatcaatcaacttctataacccccgtcatttgctggtttccgaaccccttataatcacgcgcaagcaaagtcatggcgacatcgctatatccttcaaacgatgtccctttttgacccagcttcgcaccaatctgctggcagcagatcccatgtgtgtctgtcggttgaacttcgtccgcttgttcggacggttctgctgatttcacgcagcggggggggcgatcataccggcaactttctcatcactgagataatatttctcatcaacattctgctccagcatatcgctaagggagtgttttagaggaataggggaggggaagttgaattttccattgtcaaggtctttacgaatgataacgcagtagacgcgctcacggttttgagggataccataattttttgcattcaaaacttgccaataaacattgtagccgtagtcctccagctcctttacaaagaggtcaaaagtagccttaaaacgagcgcctacaatatttttaacattctcgtaaattgcaaatctcggtttcttttctctcaaaaacctgagccactctaccaagagagaggatctcgtcttttcaatctctgttgatccacatttggggcatttgtcccgcatagtgtaatgggcttctaagggattgtatgtatggccgcaacttttacatgtccatgcagccccccccctgtttgcccgcgattgagaagtcctggcaagggcttccgccaaacatcgtattaaaatcagggacagatttctcatctgcctttgtgatatcaccaatattcagtgacgaatcgatgccatggactgcgcaatagctttctgcggcgtacttatcgaactcgcagaataaggcagttttgtagttcgtaatgattcctccttatcatgccattaagcggcttttttatggatttcttcaaacacaatttgtttaggtagtataccactgcacacatatacgctactaaatggtggatttaatgaggggatttgttccgaataatccttaaaatatgctatccgcttattcatatacatgatttcaaaatcatgcgtcttaaacatgttgaatcgtctctggctttcaaataacccgacaacaccaacaagcattgcgaatggcttttcaatgcgaaacaaacgatcaagtacatctgtttttagggagtagggaggattactaataataaaatcacacattggtggttcaattgtaaagaaatcttggccgttcgcaatatgtgttgcaactacttcatagccgtgatttctaaacatcttcacaaacaaactatcctccgtatcaaaaggacaccatatagttacggggggggtggaagatacttcataattggtctaatagcatattctggcgtgtaaaactcatcgtttttactcccagcaaccatatccaacttcatagcgcacctcgaatagattaactaatttcttttgaaaatctttcttcaagctcaaagatgcctttggcctgacctttgtaataccctttgaatgggcgttcgattttgctttgcagatcgcataacttgcgccaatactgcggcaaataccgatagatatttctcaattcttttagatttttgttacagcagcaccaacacgaaatacgatccaggatatcatagagatccatgtactctacgccggcgtttgacactttttcaacccagtaaaatccatggtcatgacaataatttaggcagtctgattctctcatgcccaactgtaccaacggcataactttaccatcctgactcgccttttcaaatctgccttgctcatccgctgcaatacctacataatcgattaccatatcattcaggcttcttttgaattctctgatagactgtatcttttcggaagttccccagcgacataagcctccacaccaaccatatccaaaatgaacgcccttttgcttactaaacacttttttctcaagcatagagtataaaaatggacgcttcgggtttaactcgacataagaaatccctctttcctgcaaaattggcttgaccttatctctaatgttgtagatgcagtcaaactccattccagtgttataaaatataacataatctaacggccaattctcttctatgagacggagcagcatggcaagagaatccttgccgaagctgacacttgcaatgtgcttcataccgaccacaaaccaaactggatgcggtcaactgtttaatcctcccatattacttgccataaggctttcacgcagtaacaaacaattttacctcagacttatcaatcttctgagaacctggtttaccaggattggtattagctcctttcttttttgctcttcatgtaaatgccaagaatgttaaaatgatttgcgcgatatggatcgactggtcgcatatcagatttatcctcctttcatttgctttcatattatctaccagcgcatggacgataaaattcaccaagaaagcaaaaataaatccgataggacattgaaattccatactgatggcgattggtagcataatcataaatgcccaactaaatccgtgcataattagggctacgatataatcgtaccgatacattttttctggagcggttttgtgccaccactccttttgcttcattgaggcgagaatcccttgtaaatagtaatcgtccacaatatggagaaaaatcataagcagaagtaaaaagcagttattcatatcaacacctacttcacatacacatcacgatatacgacaccgaggcggtacgcttctgaatgactcccaacacatacatcaattctgtttcccttaattgcgccgcccgtatcatgcgccttaaactctccatacccgtctatgtagactgtactgccgagaggaatgacagacggatcaacggctattgatacccatggggtaaggggagtgccggatgcggttccagaatatcctccattacaggtcgagcacgggcaataatgggagatgcggaatgtgccgatatatttccccttgttattttcatcttgaacggcctggtcatactgttggtagagatttgtgagaatgcgctgctgttcccaccatttctcctgggcaaaaagaattgccgggttgtcttcactttctccgaagctccttacatactctgcaatctgatgtgccatgttctgcttttcaatagcgctgtcaatctgctgttggatctcttcagaagttgcggcctgtgctggaaaaaccagcagggcggctattacacaagatgataaaagttttctgactaacttgataaaaacactcctttcaatcgtgtaaaaacattccctctctataacggtctcccattctttcgatatactcccaacaggggaacggctctgtttgaaaacacttctcacaacaactctcgcacacaaagccgtactccttgttgtatggacatgggtttacctttaggacttctttgccgcatatggagcacttcatttcgtttcctccgcaggtgccatctttgccttgatgtccgcctcgtgaagagccatgacatccgcgtacattttgtcgccaatcagtctcttaaactttgcgacagctttttcggcgtggggaacacgctccaattcaaaggggcgcatatgccactgaatcaccccagcgacatagaggacatcgagagctggctgggtgtaaaagaggctatcatatgcggagacatgatggtgctcatagtaatgagcaatgtcagtgtcttcaccccggctgttcttaaacgccttggtaaaggctttgccgatatcatgcagcattgccgcctcatacagctcaggggaaccgttgtgaatgttcgcatatgtagcaatgcagtgagcgccaaccgtcagatcatgatggggattatcctgatccagccaggccaagccgttttcaccccagaaaagctctttcacatccagcgtcttaaaaccatccgggtaaatcacatgaatcttgtcccatccctcataatactggggaatccaaatggacttatacatccgctccaggacttcataggggacaacgcgatcccgatgcttgctgcgctccacgcaatcggcaaaaggagttgccatgaattcgcacactttttcgcacgggactttgctcagccgctgaatggtgtccatacggcgcttatagttgatattcgttgcgtcgtaaatgacatttctgccgttgctcaaatcctcgatcacacggcggtgaagcacatcaaacaccttaccattattattctgatcctggacatccccaaggatctcttcgcggattgcgtcgctggaatgaaccacagcattaaactcttctttcagcttttccgcatagcaggacttcccgctgtaaggaagcccgaccatcatcataaacatcggtttcatattgtccctccatatactcaagcagcacagccgatctcgcttttgaaattgtacttaaacagatcaatcagcgtctggtttaatacatagtcaacggctcgattaacggttggcgtatgctcttccatatattttgcctttgtctctttcatctttgatgtgtagacttccgccatattaacagcgtcatctttactcaggcacccaaatttaatttgtttgagataatctgctttcttggagagcaggcaatcttcatatgcctcacctgcaagccaccttgtcatgaattcgtcaagccttaaaatatggtgcaattgctttgggtcgtacccgaaccgttcaatcttatctattgttgcaggatatgggtggcagagcgccttttgcttctccattgcggtgccaaccatacaattcagagatgcaaagtcgttgtatctcccgatcaactcgcgggagtccaagaccggctgaaaaagagacgcatacttcggattaagaattctgtatttcgtgaaaaggatctcaacaaaattgatgttctgttttctgaagcaatcaaacatcaggcggatgtctttcacatccacatgctcatcattttccatgatgtgcgtgtaactatacggctttcggttcaatacaaaatcctcgaaagaggggaggacgatgagctttgaatctacatcgctcccctcgtagtcgagcttataattttgcgacccttgcaggaaaatgccgacccattccgggtgcttttcctttacagcgtctaaatgttctgaaagccggcgcatgattttttcatcatggctccgctcttctatctcaaacactcctttcattaagtgaatggatttttgttcccatatccaaagaagatatcaaaaatatcagacagatcatcgtcgcctgtttttgggatatggtttgacctctgctcgttctttttgtccggtttgtaatcgatgttgtaggacatgttctttgtccagcgctcatttttacacgcttggcaagcagagcaccggataactcatttccgttatcatcgaaaaaatccgacatctttgggacagagatataaaggtgtgttaccccgtctacggtgtcttctttctcaagacggacaccatattgccgccagggttcgatcatttccttgtttgtcatgcggcatccgctacttcctgggactcttccatatcaggagcagaggccacctctttgataatgccctccagcaccttgaacgcaaagttcttgtgcttgtaagcggtgaactttgggcggttcacgatgcggcagacaacgccctcgcgcacatgggacttgccgatgggatcagcaccgtcgtagtaacactcggctacggtttttacccactcaccgggactatcagactcaggcacaaacccagaccacaggagcgggacgcagttcacgcccatctgttcacaccgatagcgcatgaagaaaggcgggtactccacaacatccccatcttcattggtcatggtcatgcgatacacataaaaggcagacttcggagcgtctacaccattcggatcacatccataactgaatacagtctgcttgccgtactgcttcacaaactccttatctccgaccttcttgttgtcgcaggaggccatgatcggcgtaccgtcgtcggtaaatccgaccacctcatagtaaacggtttcgcccttatgaagcttgccctcgaacaccttggcgtgtttctcccgaaatgcgttgcttccataaaagccgccgtcaaaggtgtcgagaacaacgcggcgggttcccgtgacatagccccagtcatagatcggtttcccaggccggcgcagcagcttgtccataaaggactttttataaccagacagcacggggaggtagccggttcgctgggatgtaccgtgcatcttcagcgtgatctcaacaagatctccctggtggaaagcgctgaggttataaggaagctgttccgtgtccgcatgttccatgaacaggggagagatggggtctttgcgctttctggtacgattgccggcaccaacagaatttccctttttacgaactgggatatacttttcacagatcgtaacgccgttgagctgcgtaatagtgtcgccctctttgagctgagagatatccgtgaaatccgcaagggatgacaggggcatgaacaggccgtcgctcttctcgccgcgaagcttcagcgccttgatattcctcttctctggatcgagatagccaccagcggggttcccgttctcatcttttctgcgcagaaggtcgttcttctgggcgaactcaacaccaagttggccgtcaacggggaagtagacacccagctcgtcaggctgcgtatcaagcccaacgattaccgtattaccgaaacactcgccgcagagcaggcgatctgcattggagtgcttacgcaggtttttaatcctggttacaaaagcgttatacattgcatcacctcaaatagattaactaattcctaacttaatcgctgtcaaggatcttgataccgacacctttatctccaatctccttcaacacggaatagagcgtttcatcgccatagccaatattcttgaacagaatcgtatatccgtcttcgatcagattcgtacactcatcatacagctcttttgaaaaccatccctcagagataatcttttcaatggtatcaatttcgccgcaggattcgttatccaaaatacaggagtccagttcctcttttgtagtgcatcgttccccagccgtcgtttcatacccagcgtcagagagcagaagcatttcgacgatcccgtaaaaatatttgatctcaggatatttctctgcgacatcagaggggatatcgggattagctttatacgcaattatgaaacttgagctgctgctatttgtaacaaaatcagttcttactttcatggttcaccccttgtggatataatcatagaaacgtctgtatgtgccgaaccgatctttcagactggcgacgatttcagcggggttcagatggaatctggaacacacctcggtcacatactcgctgtcataaagtttcttgcgtctcttattgagctgttttaccttatcgaaaacttcatcacgagagactttatattctctttccagatactttgccagatctttgttggaatactcgataaactggcagatggggcagcactcttccgggatgctataatacccatcatcgcgctccagcatcatctcttccagctcttcatcggtcttctcgttcagctccgtatcggtcataccattaaagcgagaccaggattgctgaatttcctcctggatcagacgaagcattacttctctgggtgcgctcagcatctcatcctggcaaatggtatggccgtttacgcactcgaccatctctgcctcttgtagcgacatatcccatccgctctcgacgttaccgcaaatatcgcaaacaaaactggagctgctggaattggtcacaaaatcttttctgaatttcatatgacacctcttttactgcttaatcgggcatactgccatgccccgctcttttagaaattggattgccttgtcagcggaaagatgccccataatccattcaagtgtgacatctttcttttcttcattgatttcaataatagaaattgaagaaaagtccttttgaaacaaatctataggttcagcaagccactctttacacaaatgtaaatacggacggtgtaaaataaatgtgcgggaagaaaatatgctgtgatctggttttttctcaaagcgctcaaacgcctgttcaaaggttgcatcttttagaattatttttaagtcagttacatcgctttcctctttgcaaaaccaacccgtatatccaaacctgttccactctccatggtcgagttgatacatataataagagttgtaaatcttcagcataagatttttcctcaatggtgattaaatcttctcactgtaaattcttgctcagggagaatgtgatgctcaagctcagagccgacatctgtatgatcttcatactccagctctaccaggtattccttatcgccaatatcctctttgatttttgagagaagttcttttgtatggcgctctacctccgccgctcgctctggggaatcgaagtagtcaatatactcgctgtccgggtgctcttctctccacttcttttcaaatgtgggcttatcagaagaccaccaacctccctcgccgcaatccgtaagaaattctgcgtcatcacgaacttcatccatgactaagctctcaaacatttctttctggatcggcgttgcctccatgaagtcatttagaagctgcgttacatagtcgctgccgtatcgccttgtcatggcggagatcttgttctcgccgtcctctttactctcaaacgcaaggataaagctgctggaagaactgttggtcacaaaatcctgtcttactttcatagaccctccttaaccgtctctgccggctccccactggcaatcgatttctgcgaaaccgttttcctctgtgatatcatcaattgcggcagtgttgaaataagagtagtcaacatcgtagtccgggtagccgtcctcgtcctcgtcgatatcctgccgatcctccgccacgacgaactgatcgccggcgtgttccttgatgtaatcctctttcggtgtaacgtcgatacctgcccagtccgcctctaaccatctgccccatcggtcgttcttgatgttctccagaacctcttccgatgtataaacctcaatacggtctttgtgtctttcaataatagcctgcgccttgataggatctgcgatgcgggcaaagcagcaaatgaagctgctggagctactgttcgtcacaaaatcactacgaattttcatcttctcacctctttaatgatgactttccaggaaatcaatagagatatccccatttccgtatctatctgataatccccatccgctaaacccgttatggataaagttttcaaaagcaccgtcgttatccccgtcgccacattcatatcgaatagactctccaggctccagaataaatcggtcttctgcgtcatccagaatcttagagaccaaagataaaacgacatcccttgcagtcattgtcttatcagaatggtttgtaatcaaaaaactgctggaactgctgttagttacaaagtcctttctatacttcaaaatactactccttaatcaagccatttgttttccaggtacaagaaagcgcatacagctccacatgtgagtagcacccatatcacccagaagactacggtataaatagtttcgttctgttccatatgggcaatcacctgctctggggtcatatcacgaaacagggcagacgaatcgttgatcgtaccgttttgcagagatgtgtaaatcgtacctgtcatcggcatcggaacgacattgtaatagtagcgatcatcggaacccacataaatataattcatgcggttatctaccccgacagaatcaagattaaggcgctcggcaggaagttcgattgactcatatgggaatgtgcgcccatggaatgtgatttcctctacatgccggcgatcactccaaacatgatcccatgtgtaataaacctcagtctcggtgcgtttctttccgttgctatccgttttggtaacggttctggtgtgcctggtgtattcctctttgttcttttcaatgtagataaatccgccgccaatttcatcataggttacagacgaattggatgatacatcgccatatacaaggacatttccaaaattggtgtccatcccataatagaactggtctgtattctcgataactgtagcggtgcgatatgactcgctttttgaaactgctccttgcaagattgcgtcgctgacaaaaatgccaatgaaaatcatcacaaggacaatgatgacactgaaaagaacctctctctttttaattctcatcggcaaacaagtcctgcggtgcgtctaccggcgcatcatattccgtataggtcgtatcaatcgcctcatatcccaagatgttcagaatgatattgttgggaaaagatctcaccattttgttataggagcgaacctgctcattgtagttgttgcgatactgtgcaatctggttttccgtcaacgcaagctcattcatcaactgcttgtagttttcattggcttttaactcaggataagcttccgcaacagcagtaatttctatttgagcgccctctacatcgccatgctccatgctatttctggcggaaacgatactctccatcgtctcaccttcgtaatcctggtaagactgtacggcatcaaccagattgaacacaaggtcatagcggcgtttctctgcgacattgatatcggcctgggctgcgttaatctgttcctccaaaaagatcgccttgttgttggagctgatgaacagaccgccgatcagaaggataatggcaaggacgattcccaccacaatccaagtggttttatttttcacttgtagtcactccattcatgttacttttgataatttgaattgcctcttcatcttctatataaaatgggtctcgatcccgaaacagagaagagcaaataagcaattggcaaaacctcaaatcaggatacatttcccatatatccgcaagctgattgcagaatttgcgaattctttttatatctctcatggttacaccgtcttctccgtactgctgcaaatcacaatctgaggacgaataggacagccgcccatgcaggctgatcgcttcttacatcctgggcaggaggttcggaagtggtttctaaaatcctcaaattggctgctgttccaggcgttttgaatggtgtcgttggaaatatcgtaagcccagcgaagatcctgattgtcaaatgagcaggggagggctttcatgtcagaagtgatatacatactccatcgcccaccctcgcatgtgtcgatactgttaggatcgatattgtgcgtataattgagaatagccgggatggaacaggagtcaaacccaactttgaacggcgcatccatgtggtcgatggtgtcaaagaatttctgcacctttggatcgccggcatggagcacattttcctcactacccaggccaactggcttatggagcaggaaaatcactgcgttaataccggtgggaaaatcgtggttgctcagccgctcgatagcctcgtcaatggagttctgaccgagaacataatgaatgttcgttttgattccggcatcaagcagcatttgaatggcgcggagggtatgcggttgacgataccaggaaattgccaccgctccgcaatactctttgcacagggaaacgatctcgtctgtaaagccaaggccggagctggtgaagttggggacgatgttgctctcacgacaatactgaagaatctccgcaaagttttcatgctgatcgacatcgccgcgtccgccaagcgcaagctggaatgtcttacccttacactcatccacgatgcgcttgaaattttcaatggtcatatttggatgatgtgttttaaggccattctggtagcactggacaccggacttgagacaaaggccgctggctccatgcacacaatgtcccatcacgccgacatcaatcagctccgggtaagatgtcgtaaacgggtcaacgccggtgtccttcccattttcatcgatcactccgcttctggcatagaaccccgtcttcggatcaaacatggaaacaaagcggtttttacggtctatctttttgagcatataaattgatactcccttcctcttttgcggttgtttttcaccggtttttattgagattatttgtgtattttcaggttggtagcgattacattttgccttgtgttcccaatggaacgatagaagccgtccgggttgaattggcgaatcacctcatagatttctttccttccgttttcggtgagaaccaggttggatgtctcatccgcatgggtaaatgcgaatgtgcgatttgcgcttgggtacatcttggaaacctttttcagttcgtttccgacagcctcacgaaatcgacgctcttcaaatctgccgtatcgaaagctgccctgaaactcattccacacattggtgtcgtcactccgctcttctccaaacagctcttcagaagtacattctgtagggaaaagaccagcgccgtgccgcgtaaagtaagttcttgtaacaaaacaaacctccaaatcagcagattttgaaagcccgctattatagagaattttgttgacaccagagaacccagtgcgggaagtggtgagattgggagcaaactcttcatagaactcatccagcaacagaccttgtgcgccctcaaacacaatgccaccatactcgtgtacgatattatcatccgtcactgtgcaataccgcatcatctcattgacttgcagaatccagttgtcgatcacattttcactgaggataacattcaaatccgcaagagaaacagacgatacgccaagatcttttagccttttcgggaggtagtagtcgcgctgcatctgaagggagtgctttagatctacagaaccaacacagccgggggtgattgtgtacccaacgccatggttacgataccgcagaaccgtttcgttaatgccgattccgcagcttccatgcctttgatcgccccttgctctctcaacaatttggtttaccagcatgtcgtagggagttgtaattttacagttgtggttgatatataccttgggctgcaaccaccattctctgcgaagattatcaagctccttgcagaacaacatggggttcaaaataaaatcgccagaaaggtaagtatcggtattcctcacgaaactcccagcaccaaagtgactgaacacatgacgctttggatttccatatgcaggaaccacaacggtatgtccggcctgtgcgccgccattgaaccgaatgtttaacacactcccgttctttgacaacttgctacagaagtaatcggccatcaatcccttgccctcgtcgccaaagtttgcgccaatcacaacctttacctgcttattcataccaatacccctttctggcatttcatcttattttatttttagaactcaaccacatcgctcttggcggttacactcttcagaccgtccagggcgctcttcaccacaatggaggtggagccgtcccagcttgcggcaacctcgtcaacatccttgccgcccatggtttccagaatggacacaatgatctccggcaccttggtgtaatcgctgaccttgataacgcgctcgcccatcaaagaccgccactttgcaattcggctgctgtccccgtaacgatccagaaccagatggaacacctcgtacttgcgattgaccaggttgagaagttcatctacagggatatcacgctcaacggtgtcgccaaagatttgcttgatttcccgcgcagtcagcttagtgggataacagtcgtcgcccatggtgaaaaggaaacccttttgatttcgcttgttcagacaatcaatgtccgtgtgcatggcggcaaagtaccaggcgaggggatagctctcaaacccgtttccaccaccgccgcgctcaaagtagagctgcgtcaactgctccgcaatgcggatatcggactcgaactgcgtagcctgaaacggagtggtgtcgcacatggcatccccaatggcgttgaacataatctgggggtcagtgacaggcttgcgatccagaatctcagagaccagcacattcagcttctttgccacaccctccagaatatcgctcatggagcctgttacatccaggccaatgataatcgcattgctgttcgggtggtctgcgctgtcccggctttctcttacagggatatccttcggatcaaattctgctttcatcattttgctggtgtaaataccagcggcgctctttccagcgatagaactcttggaataactgtcccaatcgtggggagtccaacttccacaacccatacttcattcctcctacttgtaaatgtctgattttgttacttgcatattgacaaacttacgttctccgtaagatttatccagtgttttgttccatcgactaaattcctccaccgcatcatgcgccgaccctgtattcagaaactggcgaaatgcttctgggagagaggacaaatccgatatctgccggccaatcagctttgcggattccaagtccgtcatggcatcggatttcttttcactctttgccttgagcggcatcacatcgtaaataacacgcgggactccaatcatccttgctccaagcttttgtgtataccaccagcctccgagcggaagaacggcgtgtttggacggagtgataaaacagttctgtatggtaagcccgttatgagcaattcctgcatagctgaaataacagcatagattggaaagccggctcataatccaggccacatgacgatcagggatagaaccgccaaagaaatctgctacatcggagagcaagaaaacatcttctggctttttcagcacaatgcagtaccgtccatcttccagagaaagcgcatacaatatctgcggcatgaatctggatatctcatcctccatttttctatttgcataccttagtcctttgatttgctccactgcgttatcaaaaaactttttatttttctgcgcaaacagatatgtaacggacgaatttgcgatatatgcttcgccaagctcaaacgggacttgcttcagatatctccccacatacttctttccagacttatcttttagaatgatctggttgctgacctcccaggtgccggcatcaatcaacctaagagcttcctcataaagctggtttacctttgccatgacctcatttgcttttggatctgtgctaatatcggggtgatacacccttgcgatttcccgatattccgcaatcacatcttgtttgcagtcagaagaaaaaatgtctccgcattttttagccgataaaatttgctgcgaagtcaccatctgaaccaatcaccccatttgatgtaagtatttttccaggccgtccacagcgttgttcatcacgctaattcgccctttcatggacgcaatcgtattttcaatctcggacttgtctctcgcaatgtagtagccgttcccattggaacagataggatcgcccttgcatctcgcagagttcaccatgtttctaacccttacgccagacacgccgaacgcagaagcaattgtggagccgcgaacaggctgctttctgccgttggaatttcttttgatgtattcggtaactgcttccatagcacattcctcctggtaaaatcaaaggagaggtggtggttccacctctcctaaaacgatcacagtcctctcagagcctcttcaacgggcgcatagcgctcggtgttcaaggtctcaagcaagcactcgtaaggatcggtctgtccgctcataaccatcttcacgatgttcgtgctgaacccgctgaccagggcaacgccaaggtcgttttccttgacaggaattgtgccggttctgctgttcacattccagaatacaaggcggggaagctgatatccggcatccgcataacgctgggcaagaaccgtgaacagccggtcatcaacacatctgtaccctctccgacgggtgttggtcacggcacatccgtcaaactccatatcggaaatgatgaggatgttgtgagggatgtcgctctgagacatgttgttcttgatagcggtgtccaaaatcaggtcaaacacggcctcgatattggtgttcgccatctcgttatggctcagcgcaatcctgatcttatcccgcagcgtcttgccgtggctgaaatcaaccagccgaggattttcagagaaagtgatgtagttgtccttgaactggccggaagagcgctcagcgaaatagatcgccagtgcgtttgccacatccagagcggtcacattaccgcctccgactctgctggtcatactgccgcttccgtctgcgacaacgatggtattaccgcatccgttcacggtatcgggaagggacttccaaagagcctccagcgtctgatccagagccttaacggtcgtaccccatccaccattggtgtaccgatgtacgatgtcgtgggggaagagggtggaggcgttgatcttagtctcgcccttttccagcttggaaaggaagtcgcggcggcgctcttcgtcatgacgcaggaacgcgctgttgtaaatcagattggcgcgggacgggacggcctcatacttgatctcgtcccactcctttgcggacatcttcttctccacgatatccagcttcgtgcgcagagcggaaagcgcacggcggtagtcccactcctgaatgccgatgtaaccgcaaatcagctttgcatagcggcgcttatcagcagaggaagagtgcagagaggggagccactttgccagcagggaaacgctgttgccgctgttcatgttggcaatgtcttccttgagctgggcgcacaccacatccagtacatcgccctgcaaatcggtatcaaacaggcaccaaagatcgtcccagcggccatactcaggcaccagccgaatcaccggcttgacatactcaggagagttctttgccatatactccagcacaacgcggaacagacggcgctctccaaggccaccgcgaatatcgcgggcgaagaacagccacttcatcgccgtgacctgatcctcgaagaaagcccttgtgaacctggctgcgatgtctgccggggttgctctgcggagagaagacacggcaaagttcagatcgagcagctccttaccggaggtacggtagccaacagcgccgttttccgtaacagagacattgtactcgtcgttcagcgtgttcttcattgcggacatgaaattgttgctcattttagattcctccttagattgattaactaaatcctaacagaaaacttcaaggcacttatgtccattgtgttgctgcttgtgccttaaaggaggcaagaggcggaaaggatttgaaccttatcgtttcagattatgagtctaaaaactttaaccagtgttttgctgtgcgcctcttatcatgggagcttttttcggaaacttcccagaaccgaaccattgctgccaactttttagggactgtttgaatggtgaagtcaactcttacccctggtgcagcaggcaggaatcgaacctgcgatggcggctggcctttttgaatattgctgttcgtgtaccaaaagcacacactttttatagccgctgtcttaccacttgaccactactgcgtaaatgtctgtctttccagactgtcaccatttctgcccatttatgaggttggtttagaatggtttaagcagctcttcctccggtgccaggagcgggacttgaacccgcgaccacgtgcttaacaggcaaatcagaaagttgctgtgtgcggatcatacaattcgcatggggtgatattacgtgctctaccgctgagctatcctggcatatggcctatgcggtcagaatcgaactgacaatctaccaatcgcacccgcattgtacttctgccggcgttacgcatagatattggtgttaggctcaccagaattgcactggagcacttctccggttctggtacaaccattgaagcgtgacccttacccaactgtgatcatattttagatgttcctacaaccaaccaagtaaagaaaggaggcggtgcgggagagaggacttgaacctccgacaaacagattcctattttgatgttgctgtacgcgcttttgcaaagcacaaactattttgtccgttgctctaccatctgagctactcccgcatgttctattatatctaacaatccagactcgataaaattaaccgcactggacattattttttgtgacggctttgggagcttcggagtcgaaccgaacgcaaagtttttgcagaacttcaaagaaaattgctgtaagtgtccgccgccctatacacattgatgctgtcaccggacgctcccatttggtgctggtggcggggatcgaacccgcacggggtatccccacgggattttaagtcccgtctgtctgcctgttccatcacaccagcagattggcggggcagacaggactcgaacctgcacatcctttcggattactggtggtttagcaaaccacttccttaccagttaggattactgccccaaaacaaacaaggcgctttttatgttgaatttcaagttcaattttgtgttagattgctgtatgcgccttaaattatcttcacccacaacacgacacatgatatgttttcaaatcttcatacatataaaattgctgttagtgtcgtaactaccgacatccgattaggatgctgtttcgctctcttcctccgcttcatcaacggccaggagcttggagaaattcttgatcacaacgcagttgcgcttctggttatgaaccagcgtgtcacgctgctctgtaagccgggagatatactcgtcaatctcggacttagtatcttcaatctcctggtttaccaattccaggccagagattgcccgcgttacgatgtcaacggcactctccgcatccgcctggagctgatgaagctttctctctttctcagagatgatatcaacatagattttcttcatcagcatcacttcaacccttccatactcacgattgcattggaaccggaaacagtgggaagctcgccgttccacttctcatacataatcttatcaatcagctcaggtgtaagagaagctgcaatctgagcatttgcatcagcctcggcctcagcagcaattctggttgcttcagcctttgcctccgcctcgatgattgccttttccgccgcaatctgggcaacctctttatctttctcggcctgcaccttggcagtctgcgcttcaatatttgcaagctcaagttcctgctgagcatttaccttcttctggatcgccgctgcggtctctgcatccacagaaatatccgtgaagtttacggtgtcaatgatgatgccgtatttatcaaacttatcacgcaggtatacatcaagctccgcattgatttcggttcgtttgtcgccaaaaatatccgttacaggataatttgcagatacctcttgcgtccaggcaataatcttgggtttgataaatgtattcttgatttcctcgccggacttacccttaaacagggtaaaggtttccgctacacggtcttcgtcaaagcgataggagaactccagattaacacgaaccgtcttcccgtcagaggtcgggatgttgaagctctcatcatcaggggaatctcccttgctctcagcagtaagataggactgctcaataccgattgagtatgtcgttaccttcttagtaggggagacaaggtgccatccctgttggagaacctcgccgtccacgccgccgttcatgttatacacgacaccgacatagccggctgggattcgctcggtacacataagacccaggattacaccgccgaaaagaatcacggcaagcacaattgcgccgataaaaccctttttaaccattctgttccgtaccatccttttcttcttcagttttttctttgtagtcatcttttgacatggaagtttttgcgtcctttatcaatcggtaaacgaacttcccgatagggataaagcaaaaggaaagtaaaagccataacactgcaacgccgagaaacaggagcaatataaaaactggcatgttattcctccgtgtctaccttttcggcagacttcttctctttttcataatcgcagtcgggcggcttcagaatggcgatgtagtcgtctccgtttgtgtaagaagacagaggacgaacctgcccattcggttgatttctccgacatccgcacttataaaagttcagatatttgcaaccattacaggtgagttttcggtctacccaataatagccgctgtcacttctggccttgcccatatgtcatacactccttattgttaaactgcgatttatcagccttggaatcaggccgatcacccgtccgccactatcgtcaggaggatcgtccagaggtcttccgcacattggacaaaaccgaaagtgaatttctttcccagatgtgtccacaaaagtgtttgtacctgagataatgtgtgcggagtagtcgccggtgccgtctgttttatccacagcccaaaacggcctctccttacgacagtaggtacatacaatcaaattacaccactccaatcatctattttggaaccagctctatttatccgttcaggtatcgatcctgccctcccataaaaggtgttccacctggaactgttcggatataaaattgattaactaattccttatatatgacttaaagggtcgcccctccaagtcaatgtgaaatcatccttttgtatctgggaagaagtattctctgaacttatgataatcacgaagcttcttatttgcaacggatacggacggatatgtttgatggaagaccctttcaatcgtctcaatatcaccgctctgaatctctccgttttccagctcgtatgtgtatgcccggttaaagattccagaccagtaaaccttgtcataggcaaagaggttgatttcttctccgccgctctttccaaagttgcgaatcaaaatacgcagcgtttttgtatcaactcgatccgcacggcatgtgcgcaaaagaaaatcggaatacacatacttgagtgtgattacgcctctgccctgggattcataactggtggagtctcgatactccttgatatagtccatgatggttttgttcgggaaatatctgcggccttgaaactcaatgcagtcgtccaggacttctgcctttttcatcgcaacagcttcctcagcggaaaagccacaccaggccaaatagattgccgtgatttgtgtgctgaatattctgtcgtcaatccgctcagcaacccatagggtgtcgctgattgattgctggagggaagagaagtccttgaagtaccttgtgtcgtagacatggttcgatggaatcatatcataggtcacattttttaggttatccaaatacggctggtcaatcaaacccctttcgttcaaccacttgatataccggttgactctgcttttgtatgtggcaaaagcatttaggtttgagacgttcatcttgccgatcagtattgcgtactcttctgttgtgtagccatcctccaatgactttccgatagatctctctgctttttcaagtctcttccagaaagcatcgtacaccgatacagactgctccgagaaattctcattaccagactggatgtactggctacggtaactactgttatccacgtgccatcctcctatttctgattgccactatggagtagattagtttactccttacgaatgttaatatagcagatgatccgccgtttgtcaataggaaatagcaaaattatttttgctttttccaggaagcgaaaacactgctataatattgtgcgtactcttgacttaggccagagcacccgttggcaaagaatgcgcttagcacctcttccacctcgtcccgatctgccaaaaccggaatacgagcattcagtttcttcccgcacactacatcgccagatgcgtgtgctgtcaaacgaacctggctgcgctggatattgaacatcatgttcaattgctcattttggatcacttcttcatatgggaaatccttgactttatgtaactcctgctgtgtcatcatgccatacgctgcgttcatcatctccagcctcatttctccccatgggcggcagggaagcagcacacggctggaggatacacttgttaaatcgaaatcaccactggtcatccgcttggattctacgccgtttcgtactaccattactacttttcctccaaaactttttgattgacttacgggaaaatatgagctataataattcaacaagcgataataaagtgtcgctgtgcctttcactatatcagaaaatattagccatgtcaacagcgaaacgataaaatattatcttttggagggacgcagaatggagtccgtgctttataccaggataaaagagctttgtgaaaacagaggcatttcgatgacaaaactctcagaggatcttggcatcgccgcctctctgatccgtaaatggaaaacaacaacatcaccttccgtcgataaagtcaaaatgattgctgaatattttggtgtatctgctgactacctgatcggcctgtccgacatccaagactccgcagaaaagctggtcggagacgaagactttgtatctctgcaaagagccaagtccaggatgtctccgcaggacaaggaacgtatgatgggtatgttgcgccttggattccacgaggctttcaaggacgaagagcaataagtcctgtttatcggacacatgatttgatatagttgcaatgagtacctggatggaggtgtatcaatgatccgatatccgtttatctataatcaggtgttgcagatatacagagacatggaacagattagattcccgattgagccagacaacatcatttcaagattttcaaactgccgtattagaacctatcagcaatttgctcaaacaaacggctgttctattcgggacgttatcttgctatgtgaaagcaaatcgggatgtacccactatgatgtggcgaacaatcgatatctgattttatggaactcagacaacgccgacaacaatgtttctggaagaaagagatggacgaaagcccacgagcttgggcatgtggttctgaaacatcttccattggtcgcagaacctatgcttgctgagcacggattttgcccgatggagacatccgattttgagattgaagccgatcagtttgcggccaccctgctttgcccaatgccgctgtttgctatgcttgaaatcaaatccccactggatatccaaagagtgtttggcgtttccaacgaggcatccaaccacagatgggatgaatacatcaagtggttgcggtatcggagaaaaaccgcatgggagaatgacatgaagcgggttgccatgcaaaaggggatcatattaccctgacaaattttgcgccgcagtgccgtttcaatatctcagccggcgttagaccgttctgcatggttccataacagatcggctttcggttgcagtatatgtaatacttgccgtccagaatttgaacgccccacaaatcctttgtcctggtttctgtgccgttcatcttcttcatcattacgaactcatccacactaatttctcctgcacatccatatgttttatcatgttcctgacagctccccaattaaggggagcttgttcttttctccagctcgtttaactcccggttagcctcaccaatagtgtcagcggagagaacgaaccgcccgcaatcatccagcacttcaatgtgcccgccgcgattcacaaggttgtaaagcatttcaaacacctcctattacatctaccgtttataaacggtgtaaattaaccatcacgctatattttgttcgccccatttgagatacatttttccattctcatccatttcgcgggacataagtacagacaggagatcgtagtccacaccgaaccgctcatagatttcatccaaatctgtgtcctgcccgcgcatgaagaggttgagcttttcctttgccaacaccatctgcatctggtttgactcaatgcttccaagataggtgacaaaataaatgttcttcatccgggtggagttgtaccgaataaaccgcatatagaactggctcatccgagagttgttgtaatgcagctcaggaatgattacagtatccacaaactcaaagtttacagaagaggggagactttgctgggtgcagagtagaattccgttcccgctttctttcagcgttttccgaagcttccgcctggccgcaagagtcgtagtcgatcccgtgaccacaaacagcggtctattaggaaagcggtcacgaatggcatccgcatatgcgttgaccacgttcttatgacgcacaccgatagccacaatctcgtcctttgcgtcatccaacatgtccattaccttggcaatttttgtaggcaatccgccatggtattcctccaccgtgtttggggcagcgctgattctaaggagcaaagtaatttgctggatcaggcgcatcatagcgtctttacgcaggttcccagtagatgcaaaataccttctgcgcatccgttcaaaaaattcaatcgcagttttgtatacctcgcgctccgcatcggagaaccgaactgcaacctggtgtatcttcttgatgtcttttccagacacctccttaaaagtcctggtgataacaaaacgatccaaaatctttttcagttcatccgcattgaagatatcctgattgcgctgggcgacaccaaacaccgtgatcttctcaggaagatggctttcagagaataacttgaaccctttgctgtacggagggatgggcattccataattctcgtttggatattcgtgaagcccttcctcaatcccgtccttcttgctatatcggtcatagcgatacaccgactggcaccaggagatcatattcaccgaattgttataggccaattcaagctgagggaaaaattcagcgatattatttctggtgctggttccggtcatcagaagtttgaacctacaacgacgaaacacattcagcaccgcctttgcccgtttgctggatgggtttgtcatttcgtcgctctcatcaaaacagagggcgattttcccaccatgggcttttacccaggacttaatttgccgctgatacttggatagcatgtttaaggtgatgatgacaaaatctccgcattgaatgcgttccaaatctttgatacgattgaccatcacataggggagatggtagctttgcagcaccacatcccagttgttcttaatggagatcgcagaagaaactacccaagtacaaaatgcgttctgccgctccatccgatacaatccagacgcaatcccagcgagggttttgccggagccttgctcccactgaagaagcatatttcttttttgcaggacaagatttaggtcatgcttttggatatcgttgagataaatctgttcgtcgttctcgctgtcgtatacagtgaactcagccagaaatcgcccaatattctcatccatcaccatggaggacaagggctgctgttcaatctggtattccttctgacggcggcggatcatccttgcaaagcgcccgtactccgccgcgtccatctggtcatacacgatttgataaatggggatcggctgtttcatctgctccgacatactgcgggacatcttctggctgtacgccttgtagccgatagaatatccatagttcaccatgcggatcacatcttgaggtttctttgcgttctgtttacgcaccgtattccgaagataggcaagcacttttgcctcagtgattctgacgcggcaccactctttgtaggacatatctgcgggctgcttctgcgtgtaatacttgttgatatactcacaacatttcacatacttttcctgcaaagctggatgggatttgattgcatacaggtatttctttacctggtacatgaagtcgcttgaagcgctgttttgctgagataactccagtaaaatatgagaacgatttttacgaaacaaagtttgtgcgccatccaaaaatgagccgcgaacctgctccacgcctgcgctgttcaaggacacgccatctgcaaacatttgagtggagtatggagatgcagtccatccgtcctggtcgctgttgcgctgccagaactgcacctttgtttcatatccattgactccaatggaagagaaggtgtccttgtccaacttgaactgaccaaggaaactgaagttccgttccagctccttaatcatattgccgtcagaaaagtcatccgccaggaaagaggatgggacaacaagcgccatgatacccataggcttcatcagctccgcagccttttgacagtaatagagctgagataaaatttggttctcatccacccaccaatagaggttgaacggcgggttgccaaccacataatcaaacttgatattgggcgaatagcttctgatatccccataggttaggtttgccttgggatagagatatctcgccaccttatacgccttgatatccagctcgcacccatacaggttgctttccatcggagcaaaattgaaaaagctgcccattccacaggtgagatccgcaatgatatccgtgtcgccggggttgaggcagtccatgatgaacttgcacaccttggcgggggtgaaaaattggccgttctcaatctctttctttgcgctggagtattcatagtagctgtcaaagtcagaatacttcaggccatgcagtccaccgtcgccggtataggcattgtagatatcctcgcgtgtaattccagaggattccgcaagatcattgtcgatcagatataaaatcttgtcgtttaattcctgccggcttgcttgaggaatcgactggttcataatctggtacttcatatgctcaactcctggattttgttatatggatggaggcttttacggagacctccaagaaccgtctctgttatatctaccagagaaataggaaagaaataaaccggattgcttaactaattcctacaaagctctaaaaattccggctttgttttttccttgatttctttccacacatccgaaaacgcaagctcatgcgtccataccggcctgcccaaaagctgttcgatgtactggtgcagatcggcaaagtcgcacataagaacgccggtatatgcggatacgacacacttctcccgcttcgtcatccagttatacctccgtcccaagaaactcatccgcaaactggcgggcatactcttcgctggtgaaacgcacatccacgcggccattcttgaagcacttgatactcttcaccttttccatgaagcacttgcgctccgtctccgtggtagtccaagaccatccaagaaggtcgtggaaagcggctgggatatagtcgatctgcccatactcaaagtaggcaatggcgcggagcacatctttcatgccatccgccagcttgatttcatactcgcccttgtgccactgttcatgccagctatcaaaagaacaggcatagcgagtgaaagacaagactgctttcttctgttcaaagtctctctttccagtgtaggagttccacgcctctttatggcacttttctttcagttcattgagcgctttttcctggaatgagaaacctccaagctggacaaaaatctcgtcaagcacctgcttataggagatttcaaggctctcaatctgctccgtatactctttcgcatcgtccttgctggagtagcgcggttctttcgggataaggtgttcgatgacaactccattgtccaaatccacacggtaagtcttgcagaagtaggagacgattttggcaatgaatgtggcgtggctcttccgcagtaaatcgtggagactggtcaggcttacgccgccccgtccgtcgtagacataattggtatatacctctctgtctaccgattccagaatgtcattctgttctttgatgaagcgctcggccaccttaatcatgtccttgagcgccttacgtccatggtcataagcggcctgctgcacctcgcaatagtgcttatcgctttttgaaattctggattccgcttttacttccacggctgaaaacttatcgagcaaattcatccgtatcacctccatcattgttattcccattctcttccttgttgtgcgcagaagcggccagcgcctcacgatatgcggcatatggattctttgcagacacaatagcctgcgaatagaatgcgccgattccatcgtacagaagcttcaaaagcatcaggataatcataattgtaagcatatcgacacctccattaaattctatgttttgcaagcggcatcaccagcgcatgaaccccagaggaaaagtcccaaagggtatcgtcgcttccaaccatcaggaaagggaatggcctgctcttattccggttgaatccaagatagcagacagggtgcttgcccacacactccagcgcatcacgaaccaactgggcatcgaacacaccgacgatttccgaaccatccagacgaaccgccctgaacatgacctcgcatctcggattgtaggccagcgtccggctgttctttccctcttccttgtgcttggcaatctgttctttgatgtaggaaaggtctggtgtatcataccgaacatcgtccagatcaacggagaaataatcgccgttaccaacctcatccagaaacacacgatatacggcatctgcttcgtatttcgtagcatatgggactccaggcgcataggcggggagaaacgctgttacgccgccgtcagtgattgcatatccatgttcgcagaattgctgaccactgaccaggaagctcgatccagaaacatgcgcggcattcatcgctttctgtccacgggacaggattctcttcattgcggccaactgcttggcagtacagtgcatgggattgaccggagtgaattcatatgcccgcactttctcttctggaagctcgcagtcatactccacatatccccaggcatctccgccgatttcggagacatattttttgtcatgaaaatttttgatgctgattacattctctttcgggtaagcgccgggagtaatggggcgctgggtactatagtatctcatgctgtttcctctctttctgtttctgtcgtgacgtcttcttcgctttcttcttcgatttctgttatgccagagtcatcgaaaagcccaaccagaacacgcggcttatactttctatccgccatattggtttccaccgccttgatctcgctgtccagggttttcatgcttgccagcagcccggtcgataacaccagacttgcaatttcgaggtggtcttttgcgttcctgcggcggatacggatttcctggagctgtttgtagagcttatagccatccgacgcgctgacattgcagaattcaatcttgtgaagaacatccaatgtttcctggtcacacttcgacacctctgcaccgtagtatctcggcagcgatgcaagcttatcaaacgaggacagagtggcggacaagaacgacttcagctcttcaaactcctgctgcgccgtctcttccgtgaatgaatagctcgtgttgtaaatatctgtcaggttgtccgttgacagaatagcaagcgcttcaataggaggaagcgccagtgcgcggggagggcagctcagaaaatttgaagcgttctcttccgtcttaaactttgtcgctttgctgagacggccaacccatgtggatgggtgcttgatatatttgttggtctgtttattgaatatgacgtaaggcatatttatcacctgcttatatcattgatttccccagctcatcctaaggatttcggcatccgacatgagatagccgcgattttttgcgtacttcttcatccagtagatttgcccattgtacttcaccaagcggccatcgcatccattccgattatatttgcggcctaccatgccatccgcaactttttgggcatcttcatggattttatcggtgaaacacctggtatcatactgaatggaaacgcacaggttttccaggccggagaaattctctttgagaagttcaagaaccttgttgcatagttccacatgctgcgccgcagaacacttcttattgaagttcagcgtcatgtaggaatagtctcttccaatcaagtcagaagtgcggcatgtggtattgaagtcgttgcaccagaaaaacaagtcccacttgtcgctgtcatatgggacaccgcaatcagaaaactggtataggacaaacgcatcggcaagcttttcaattaccggcctcatgtagttagaacgcatgacagcgccctctatgcaatacgcattccactgctctctggtagaggaatctgcaatgcgcctattttcctctttctgctcctgggtatattcataagtcaggcggatggagaagaggtcatcctccgcataaccacgggcaacaaattcattgtccagtgcattgacataagagtgatcgtgattgataatcatttgaatgcctcccttcattatatctaccgctcatctactaaaaatcttaaccttaaaataaaaaagacgctgagatttttcagcgtcttttcagaaccggtcaatcatatatgaagttttctcttccgatgtactctccagcctcatagtcttcatcactgtaaccggaataccaggtcagctttccatgttttgattcaaggtcggccaggagattcatacagtcttcttcactgcctccgccaactgtgacatcgaacccgtcttcgtattcaccgcatattctccacggttccaagatattgcttctgatatcagaaatggtattgttataaatcattcattccacactccctcaatgccgaacgtgaatctgatgatgctatccttgataccggacataaaaacgctatccgccattgcgcacatggcagtgaacacctttagctcctgtccacgcagagaggccagacggcgaatctccatcgtgataatggcatttggatgagaactggacaccggctctatatcaatgtccacgacttccatgctatgggctttcatccaccgcgccgccatggaaactttttcgtgtcgctgcaccttgcttaaatcggctacgcggccattgaaaaactcattgtcggttagaatcctatccagctcttcgtctgaaaagaaatcccggacatccacatccgcctcacgggattgctttactttttcctgataatccccctccgccttttccttggcctgggcgatacgagcggccataccgccgcagttgaatacatccgacatgtcaatcaccttgctgtttaccatattgcctccatattatatcaaaaacttattgaatccacaactgcttatcttctgggagcgacggcctgcaaaagtctggagcggtttgtgttttccacctgtccatacagagcggctccgttgccaaaccgcgcccttagatacagctcgtcaaatccgtattcctttgccagcttccgcagaatccgacacaccttattgacctcgctattgtagcggcgaattgctacactgcggtacatgtcaaagtaatatcggcagtcctcgttgtccatctccgtggggtcatccgtggtttccacataaaactggacaccataataatgcccaggcaggacggaaatcttgtggaaaaccagactttcgttgacattatcatcaagacgggattcaatatccgaaacggtttcctgaacctcgatctcgtcaacgaacatctcttcctcaagctctccgccgcactcttcgcacacatcgttgtcgctatcctggtataatccgcagtgtttgcagcacttaatctcagaagtaaactcccttgcaaagagaggaaagctttccattgtcatgtagtttgcagttgccatctgaaatacctccttctattatatcatccgccgaacacggggaattcttaaccagataattaaattatccgcagaccgccttgcggcggtttcgtcgtttacgactcatcagtgcggcttaccaaacatcgccccagccaggctgattggacagctcattaaattctttctccagcttatcggcctcatcctgttcgccctcgtccgggtagtcggaaacgtccagatcatacacatccacatcaacgccagcgttggagatgacggactgaaccattccttcatgcaccttgattgcgacctggacatccatgttcttctcatgaatttcccaatgctcgaactcgttcttgcagtagtcgctaatgcttgcgctgacatcgctgcattcccagctctgttcgtcgttctgttcgctttcggcatcaatgccccattccttgagcgcagcctgccagaaattacgcatggatttctgcgcttcctccttgctcagaaaagcatctgtgtctacgccccagctatcgccgtccacgacatgaatcagtaaataaattttcatcttcagcacctctattattaaactcataagagaagaggaagccctcaaattttcatgagggcttcaaactctttctttctcttctgttctatttcctccacgcggttaggaagaaagttcatcatctttgcatattctaaagcttcagacttagcttttgatatacttccgcagactggtatgcacggatacccttttgcatgagcataccacataccagacttgggatctttgcttacagtatacgcacgggtcattatcgaacaccaaccagactggtcatgcgatccagcagcttgtggccgtccatgatacgcccccagttgttttcctgatagctcttggaggcgcgacggggagcggagtgggaaaccatgtcgctcattgcgtttaccacaccccagccggtgttcaggaactgggcgatatctgggcgcaggtaacaaatcataaactcatccttggctttctgaacgctgttcttcttgcggtcagaatcgttctcatccacggggaacatctcgtcaagcagcttgttcagctcgtcatccgtgaccttggtattcgccagccggtcggcatactcggccagctcacccatgtaggaatccgccatctccaggcacatccgcgcctcctgcatcttgtggtcgatatctccaacatgcttggtagaccagctacgggaagcagtattcagcgccaggttcagggtattgttgcacaccacgcggatgggggtcatgcacacgcggatagcaccggaaccatcatgggtattggagaagcaaagatacggctccacatcatcacccacaatcttcttagcgggcatccgtgccagcaaccagatttttttgccattctgaagactgccagcagtttcatagcggacatcgccgccaatcagctcgtcggtgaagctgaacgcctccgcattctgcacgatctggtagcggtcagatacgacacccagcacagcgccgtcagagctacggacattggccttgaagttctcgattttcgcaccgccgcacacctgaatgcttctctgctttacctcccagtccaggccagccagacggagcgcatcagcactggtgggcgcttcctcaacgcaagtccccaggccgtgccacggcttctcacgaacataaaacatagtctcaacatttgctgccatttgaattacctcctaagtattttggttgtaggttgtaggtgaatttgtcttcctattacatctaccgcttgagcgcggcaaaaataaaccaactgctaaaatttatttttcatcgcacagaatcaaaacctcgtccttactccagccattctcttcgcagaccttccaatcgtcctctgaaaagtccagggtggagccgacgctgctatggtagtccatgatagcataggggagaccttcatcctcccattgccaatccaatacgccatagcgctggagataccacgccttgctttcttcaattttctttcgcagagtaatcatcagaacacatcctcatccagcagaatttccgcaatattgatggaatccacaccggtcatatcaattttatcaaccagctttttcatggcctcctgcctggaatttgcggatacgatatagccacgcgactgattgcaaaagcggacaacgacggagaatttcgggatataaacatcctccatgaattcctctttcgtcaggccgtccactacatccttgccacaaacagggcaggggcagaaggtatggccgggggcaacctcttctgactgcaaaatgtcggtggagaaccagcgaccgcagccctcgcaattggtaatggcatttacttcccactcttgatcgtggcactgctcacactcgatatattcgcggtcagtcccctcgttgatggtataaacggtatcttcatcctcattgataacgcggccgcacacagcacaaatcttaatcttcatttgaaaagcacctcctattatatctaccgctataaatgcgcaaaaataaaccgcttataaaaaataagcggtgaaatatggggtagggtttttgaacggaaccctccaaaaccgtatcatatcaggccggcacagcttccacctccgtctcattctttacagcgctgagccgtgccttttcagcggcttcagccgcagcctgacgctgccggtcataccgcttgacgcgcttctcaaattccgcatcggaatccatcggcatgttgtaggtttttcctccagccttgccgatgactcccttggcaggagcggcgggcatcacatcgtttttgaaaaccacgccatgcacaccggcatattttcccaggccagacttcttcggattgctattcatattcagttcctccttattattcatgggcatcgcccattgattcacagaattccttaaaggttttctttgcgttgtatttatcgatgaacgcatcatacttggagattaactcctgggtatcacgactgccctcccttaacttgagaatttcatcctccatggccttgttaatattgcttctgatgtagtggcctaatgaagatgaatcaaaatatgtttcccgaacgactttgccatccagcaaaatttcttcaaacagcctaacatcgtatgtagcgtctgagaaataatgcacaaggtaaaaagtgattgcatcgtccaggctggaatacttgcgggattgatagcgatcccacggctcaccatggttgaagatccccttgcagatgtaatcccaatcctttttgttattcacgaactcgacggtatatcttgtttcaatattcacggcgctgtcctggtaggaaaccataaaatttcacctcctattatatctaccgccgaatccaggtgagaatttactcaccctcagaaaaattttcgttttcaatatctccgccgatgctgaacacctcataggcggcagactccaggcggctgatagaggccgtggcggtcggctcccgctccttgattgcgtccgcctctgccgtcatgatgtcattcaccagattgaacgcatccacaacgtcatcatcggaaacaatcaaaacggaatactttcttttaatctgctccagcgtttcctttttcaaatacatggttacatctccttatgaaaattttgattgaatgtatcagagtatgcggcaacgccattccagtcatcgtagcgcactttttccttttgtccgccgcactcaaaaatcaggttagctctcggctcgctgccgtcttcaaatacccggcgctttccgcatatataccactttgcaaacggttcacgcctggacacctcgcgcagataatagcggccatcctcaccgcgatacacctgccgaccggttcccgcctcaacctccataaacttgaccgggataattttgtccgggtttttggcctggtcattgtaataattgttttgtgacacttccaggcaccacatatccatagaggaatagtgctgaagcttgacattttctcttatgtagtcttcacccaggcgcatataggtatcaagtcccataaagagaacaccaacatgagaatcatcatcaatggccgtgatttttaccttgtcatccagacacgacggacgcatcccgataagcacatattcttttttgtctctgtccgtgggagaagaaaaggaaacaatcattgtaccatcttcctttcgtacttttcgatctgccgcatggtcaaccactccggctttccatccttgggaaaactattccagattgctttcatgtaggcgatctgaagctgcacacttccagcccacaggtatttctcaaccatattgccaaagcccaggaaatactcgcagtccatcttcatcctggacaacagttgatagcggaagatttcatcctgatggacaaccaggttgatttcatactgctgccgctcagaaattgggttcataacattgcaactgcatttcgcagtcttcatattcaacattgcaaccacctcctattatatctgccaggccagtgacgaaaatcttaaccttgaaaataaaaaaacggggagtcatccccgttttttatttcaatccacagcatacaccagctctacgccgtcacggtcagcgaaaaacttttcggccaccggacaacggctgcacagcgctcgattgcattcaccaggggcgcggcaggccgcaccattcacgccgcaaatctcagggacttctccctttgcgtgaagaacaatgcgcttaccggttagcttttcagcaaccagccgttccagataccgcagggcggttttgtcatcgctgaaaatctgagtcccaatcttccatccccatctgctaccataatgctcagggtctttctctacggggatctcagcgccgttgcttaaatgaatcatccagtgcctttcgtccagcacctctgcattaagataaaggctatctgaaacatacatctcgaccatgatacaaacctccatatctttttggcttcctattacatctaacgcacgacaactgcaaaaattaaccggaaaaataaaaaacgacgcagattttctgcgtcgcatgtgtgttcgtgttcagcttttcttattcgccggagagaatggcatccttaaaattttccacggcttcatctttcaaaatctcagaatagtgggtgctgatagcgatatattcatccgaaagactttccctggtagcggtcagaagattgtgcgcctcttccacggttccgccaaactcatccgcagaaaaaccctcttctacgaaaaaatccaccattgcggcctgggcagacttcagcgcatcttccgcacccgtcccatccgcataggaattccaggcggacatctcatccatcgccagattgaacagttcatcatgcttttcaaccgccgcttctgccgccgctgcaatttcttccgtgttcccggactcaatgatatcatacattgtagtccgctctttctgttctgttacagagcaggcgcacagaaaacacatcagcatgacagaaataaaaagacagcacttcttcatctttccgcccctccaatcgtggtaggtgatagcaccattctatcacccccacgacgataaatcaatcttaaatcacaccaaggtttttcagggcggctcgtccaacggtttcaatatgaacatcgtggcatccgtatttatcataccaggagcaaagcacctccgtgccgacaaacgccctcaaacaatcccaggccagccggttttcaaataccttataccgcccgcttgccttgagcctgggcgcataggctttaatctggtcaatattcttttgaaagacagcttgaacgccgtccagctcagcttttagcttcatactcctgcacctcctgagcatccatttccctgatgtattcgatttttgcgccacgcagcttccatgccttgatatactcgcggccacgctgccgggcttccgtcttattctttgcggtgcatttcatctcaccgcttccgccgtccgcatcgctgatacatacggcatagtgcttcacatcgtccacgatctcaaaggaaacgccctcgataaagaggacggttccatggcctggtagaaaagcggttcgccggcctttccactcaggatgatcgccgcgaacatcttcaaaggttccgcgatacgctttcgggattgcaaggtattgagattttgtaattcgctccatggttttatccctcctattatacctaccaggttaaaacggagataatttaccatccatcaaagatttatgatggaaatggtgaggtcaaacagataggcttttatctcgttgataaagccctcttttgtgtccaccacatggaagataaactccttttcaatccgcctttgcagacgcttccactcccaggtcagcaccagcttattgggatagttgtcagcgatagatggagtgatggtaaaggtgttttcaccaatcgcagggagaatgtcatccgtgaacgcctccagcgccaggagaatttcatccagaatatctttccgcttttcaagaatcagcgcttcattcattccaatcatttcaaccgctccaatccattaaattttggtttctgttatatcacacaatccagaatgacaaaaattaaccggaaaaataaaaaaggcggggaatttttcatccccgccagtctgttacatgatgaatgggctgttcagcttgtcgcacccctctttcatcagagccagcgccttggcatcgtccaccgtggaagcgatttgacaaagcaccttgtaattcttcttgggctgctgcgccccgctatccacacgatagcccaggccgttgccgcgcatcatatccgttccctcaatcggttcatacacctgcacatgaatagagggctgctgcgccaccgtccgaaagttttccaccacatcatgatatccaaccgtgacgcggagaatccgcccatcttccagcttgatatctcgaatggcctgcttttcgccccaggtgacaaagtgcatcacatccagcttaaagccgccgctcagttgcccgttccacttttcgatctgcgccctcgtgatttttgccatgataaaatcctcctattctttattcaacggcgatccgcttgcaatcgccggaaagaacatgctccagcttgctttttacgctgccaaggttttccgcctggagctttgccatgccgcgctccatctggttcgtgctgcgccgtgccacctgctcatagtagttgatggtcagctccagagcgctcaccgtccaggtgatttccgttttcgtcagcttttccattcattacacctccaggccacgccgcatcttcatgccgtccacaacggcacagatcgcgctcattgcgtccatataggcatccatttcctcatacttgccatccgcccggctgctgctcgaccactgcccataaagcatcacggccatatcacggatgttttgcagctcaatgtccgtccggccatccagctccagcaccttcttgacttgcgccgcctcttcctggtcaatccagccacgctctttcggtttgaagttttcctttagctccatgatggagtgaaaatcggttttggttgtcatggtaacatctccttctgttatatcttccgccgttcatcaaggggaattaaccacagatgcaaatttctttggtaaaaattaagtacagtccaaaaggcaggagaagaacaaccgccgttgcatccctatcttccggggtctttccagtagcacacaccaggcaaatcaggatggagagaagcacgaaaaccagcccataaagtttctgtttccgcatcagcttccgccgctgttcccgtgttttccgccgcatcatccgtgtattttccattttctgttccctccgtctgttctacttattaaaagagattcacaccatcaggcatgatataaaggctgcttccgctatgctcgaccttccagccctccaggtggtagacatccaccatgggcaggtaaacgggattcttccagccatccaccaccaggcgaaagtccagcccatccaccaggacggaaacgacttgacgggaaacggtgccgtccgtgataaccaccaggccaccggacgcaatccacgccgccagccccatttccagcgtgggaagctgttccacactgttacagcgctgcatatcgtcatccaccgcgcccaggttgaacacacgccccaggtagtaggctttcgcctcttccaacgtcccattgaagccggtttccaggctatcgccattttcaaagccgattctgaaatacaacatgctaaagtcctccattatgatttccgctgttctgttcttgaaattaaccagggatttcactttttcaatccatccgccccagcgccggcgctcatccagcgccagggctttcggattgattaacttattcattacgccgccaccatgccagaggccaccaggtcagcgcggatcttcttcaggcgcttgcacaccgccgcctcagagattccgatcatggccgcaatttccttgctcaaatagccatcccggattccctcaataatcatgcggtctttttcgtcccgtccgttcacgaattcatccagcgccagccgggaaacgacggcgggttccgtgttgtccttgcggttcgtcgctacggtttccagcgcgtccacctgttcgccgttcttgtcggtgatggtgtccacacgaccgcgcccgcgcttgatatcgtcgttgtaaaccttgcggatagcgtcttttgcggagcgatacaccagagaggtgagagagatattgaccttgccagccgccgcccgctttgcgttcagcgcttccagatagtcagcgtccagccggtccgccagcttcagccacgcctcattcaccagcccatcaaggccatggtatcccaggaaccacgctacagtctcgttatactggagatagtgatcttccgtgctgtagccgatctcgttctttgccgcccgcttgacgcaagccgtcagcatgttgatctgctgctgctcgctcatcgcctgccactggttcaggatgttggagttcttgacgtgttcccacgccatttccagacagatggagaacacagggcgcaggccgccgggctgcttgttcgcgtggtaaatctcccacgccttgctcatgacttcatgcagattgtatttcatggtaaaagctcctttcaaatcgtcaggcggtttacgccgctgtttatcctttcttttgggttcccacgaccgcccgcaggcggtttcggaaagtccccagctttccatcatcaggtgggttactcaatcgcgccccgctttttcaagtcgtagaagcaccagcggttcacagccggttcatccattcccttgaacgcttccatctcttcatcaaactgcgccttgtaccgctcgatctcgccgcgctgtttggcaatgcttgcgccaaagtagttgtacccagcggccaagtccgccgccatgttccgcatcatcgtgcccatcatcgcctgtttatcctcaaaccagaggtcgaaccagtcgttccgctcattcaatcttgccatgctgtttagctcctttcttgaagtcccaggccagcggggagaagtctccgccgccaggattgcttaactatttccttagatgaagtacatgctgccgttgtactcaagcgctacggcctcttgccccatctcgtgcttcagttcattgcagaggataacaacatcgtcaatgtacttttcagccgccgccgtgtcacagaatgcgaaaaccatcgttgttttctcagccaccagagcgccattctcagccacccaatacccacggacaggggaagcagtagcaccgccgaagcactcagacagcaggcgcgccacgcgctcaacctgggcggagttgtcgatctccttgtttacatcgaccgtagcaggcacatagacggtgatcttgcttttcaggggaataaggtctttcagtttcatggtgtcgatctcctttcaagattgcttaactaatcccttttggggattccgcccgccgtccaccagagggggagcggcgaagcggagttgatttgctatctccttaactctggtactattataccgcactttatggacgaagtcaagaaaaaaccgctcaaaatttatcgctttttcccttgaataataaccaaacctgcaaggcttgatctgtgcaatttgacgaacgggatacgccagccatcacgcccaccgccagccctgcacccagcccagccaccaccaccggcacggcctggacacccgccagccctgcaccaaggcggagagcctggagccagggaagcccaggcggagccagagccagcacccagcagcccccaggcattcaacgcccagcagaggccagcaggaaccaggggagagccagccgccagaggacgaaaggcaaagccagcacccagcagaggcggagaggacgcaaggccagcaggggagcgccagccctacccagcccagggaaccgggaacgcctgcgcccatgcagagccagcgcccagccaaacaccagagccagccccaccgcctgcacccagggagccgacgatctggagagggagagagggggagaggggagaagagagagggagcgcacagaaaatcacagcataagagcgccgcccaccacctgcacccgatgaggccaccgcccaggcgctccacccatgccgccagccgtcccagcatcccaggccagacggccagccctggagagcgcccagcgccagggaattcaattccgcttttgtggagtatgcggaaccacccttgaccaacgccgcccacgccatcccaggagaggcaaggcaagggggacggtttacattttgaccggaaaaatcgtggcgaaaatttcgccttgtaccccattctccacacctctaaatctttcacccaaacaaattccttacatcaccaccttgttcatcgtactattctttgccttaaagattattcgagaacgggttcgactcaataggttgatcatcgcctatttctttggaatcaagatttctttcaacatctcctaacgggtggatttggcaaggaaatctgcgttgaacatcgtgttatattttcacccttgccttataaggaagcaaataatcaactttttcaccagatttcattgacaaagacaccccgctctgctataattataaacaaggagataccgtaacttttgcccgtacagcaacggtaatttccattagtaagaatatagttaaattatcttttatggaggtatcactatggaacagtacaccgagaatgcaattgttacggtagcacttcaccctggcctggaacagttcttcaagcagcagagacctcacaattacaagaagaacgaacggcagaccgtataccctatcaagaagcatgaggaaatcattgctatggcgaattggcttcttgagcataaggatcggaagtatgtgcttgcctttacgcttggcattaacctgggactccgagccaatgagcttctgtccttaaagatgaaccaggttttctgccctgatggatctgtaaggatgaatgatgatatggaggacacctctgacggcatcgaaatcctacagagcaagacgggaaagtttagaacggtgttccttaaccaagcttgtaaggatgcgttggagtggtgtttcccagagagggggagctatttacattgtaatggctacctgtttcccagcagagagggaggttctattcaagtcgggacttttcgtaaggttctgaaagatgcggcaaaggcatgtggagtgaaacagaatgttggaacccacacttgccgtaagacatggggctggcaccagtacaagtacaactctgataaggcgaatctcgacatttcgatgcttcagagagctttcggacacagttcgccggaagtcaccctcagatacttggggatcacggatgaggaagacaaggctctgtatcgaaacatgtgtattcatgttatttcagacaaaggctttgaagaccatggttttatgagaacatgagtagagaggtatttttctattcgacaatagaaaaacaatacatgtatcccccacccactctaaaagggaagcacttttcaaaattacttcatcaacggctatttccactgttttttaggggcgttttgctgagtggttttcagcaaagtttacataattaactctctgtaaggtctaaaagtcaaaggaggacgacccattggacattaaaatctgcgacgcaattatgggagcggggaagaccagtgctgctattaactacatgaatgactctcaggggaagtttatcttcattactccgtatctaaaagagtgcgacagaattatcgacaactgcccaataaagaatttcaagtccccaaaggataaaccgagaagcaaactgctcaacctgcacttccttttggagcgagggttcaacatctccagtacacacgctcttttcgccagctatacggaagatactatccgtctgatcaaagagggacattatacgctcatcatggacgaggtatttgaaatcgtgaaagagatcaatgtctctaagggcgatgtgatggatctccttgcaaatggatatatcgaaattgataaggaaacctgccgggtaaaatggctcaacgataactatgttggcacaactttccaagaccttatgctgagagctaaggccggcacactgctctactacaacgacacatttttgttctggatgtttcctcctgaggtgttccaggcttttgatgaggtaatcgttctgacatatctgtttgaagcgcagcttcagaagtattattttgacattaacggcttttcgtatcgatacatcggtgtggagcagcgtaacggcagcttttacttttcggaaactgggaatcagtttaccaagatcccaggtctaaaagaaaaagtacacatttttgacaacaagaagctgaatagcattggagacgaaaagttcgctttttcttcctcatggtctgagagacatttccgaaatccagtatcatgtacgaaaatgcgtgatgggttatacaatgttttgcggcaccactacgctggaaagagcgggaacagtatgtggactgcatttaaggcgcagaaagatagaatcacgccaaatggattcaaaaattgctttgtttcatgcagttgccgagcaaccaatgagtacagggagaaaaagaacctggcctattgcgtgaacattttcttcaaccctttcttgaaacgatattttgaggaacatgggtgtgttgtggacgaggataagtatgcgttgagcgagatgattcagtggatttggagatccgcaattcgtgatggaaatgaaataaatatctatattccgagcaaacgtatgcgaaacctcttgacaaattggctaaatgaggttagtatataagaaaggagttagttaatctaatgtgcgaattttgcaggaagtacaattttgaattggctacggccaaggtggatgaaaccggcgcatcgatttcggtttcaggaggacattggcgtttcccaaaagagcttcagttcaaattctgcccagtatgtggcagacggctcgatccgtacttttatgatggtatgtccaatgagcaggcggaacggatcttgatttcccacctaatgtatctggcgtttacaatgccgattgagtggatcgagaagaacggagagaacagcgactttcaaaaggcgtatgggatggcgttggacgctctgcggcagggaggtggttaattggagagggcaaaatgttacgaatgcaagtatagaggcaatgttcctggcgacacgcatagttgttgccgctaccctgggaacgatacgaatttatttgcaatgtttgagcaaacaaacctggtgcaaatgattaaacttggcatcaaggctgatcgatatggttttgagaatggttggtttatgtggcctgttaatttcgatccgatttggcttttgaactgcaatgggtttacaccaaaggatggtgaagagataaatggcgaataagcttatctccggccatatcaagcaggccacgcaagaagcttttttgccgagttcgttgagaactgagtttggcgaagccatggccgtggagatcagcaagacgtatatgattgctgataagacagatgaagcgcttggatgcttactctatgagctgcgccaggccggaagtgatgaagacagaaaaaggttgttgaacgcaatatgggaacggcactatgaagtggccgcacaaaaaatcataaaaggaaatagttaatcaatctttatggagggaatcaaaatgctgacgattgaaaagcctgacaagaatcatccttgtaacggttgtcactactggcgctggatcggcctatgccaagcgtgtaactactgccttttgaccggacacaagcgaggttgccccgctggagctgggtgcgataagagagttcccatggatgatgaactcaagaagaaagagcagatcaggctttttcattacggatgtctggagcggggagcatgattcctttcggatcgattgaggaatggcgtggagcagtataccaaggtgtggattatggatggagatttgaagtgtccacatggggaagactcaggaacgccaaaacaggccatgtgtattctttcggatatggagacggcgggtatctacaagcatgtatttcgatcaacgggaaaaggctcaatgtccatgttcatcgctgtgtggcagagacctatttaccaaatgaatgcggctatgagattgtaaatcatcttgatggctgcaagcagcacaatgatgtttggaaccttgagtggtgtaccaggaaagagaattactttcatgcggttgatatggagttgattgattacgatgtcccgtaccgaattgggtacttgtcccatatcggcgcttatgttggaagcagtaatggaatgtctaagttgacagaggcggatgttctatatattcgccagaactatattccaaaaggcaaggggcaaaagtgcaatcggaaagagattgcagagatgtttggtgtttcgccaaaccttatctcaaaaatagtcagcggatctatatggtcgcatgtataaagtggtaggaggtgaacgatatcggacaatttttcattaagatgaacggagaggatattcgcatgattttaagcggcgataagtcgcaaatgcgtattccagtccgacaatcttcagagacggacggagatccatccccgccgtatagtgttggagatattttaggcataaaggaaacctgggcttatgtggacggcaagtatgtttacagagcagatccagaaaatgaaacgaagaagattttatgggtgcagtctaccaggattccagaagaggcgataaggctattcctttctattagggatattcgtcaagagcggctgcaagatatttcggatgacgatatcagggaagagggtatatggcttcctggtgttatagatcccagatttgcattttcggataagtgggatatgtcgcttagtaaaccgatgagaaatcgatactcttgggatgacaacccaatggtttgggttttggagtttgatagagtttcagatacagaggtggaacatgacggtatttgaatttctttcttcctccaaagagaatatggctaatttcgtttgtgatcgtgcggttatacctccgtgtgatttggtctgctgcaatactccatgtaacgcaattgacggttttaataagactgcgagagatatctgcatgaacaatatacttgaatttttatcgcgggagattgatgcagatggatgatattagagaaacctcaattgatcatgtagcaggggaaaactatgcgactttgtttaccagtgagcgcaaatggatcaattatatttacaaactgaaagagtctcatcctgacgaagtagacattcggcatgtaaacaacgacggaagcctgatcgcacatattccagcgtcgtggatgaaagtaaagccgaaaaagaaagtggtattaacagaagaacaaattgaagcttcaaaggcgcgtcttgaacgaggcaggcagaaaagattaagtatgataggagatgatgcgcatgtaagttcagaaaggagcggtgaagatgagccataatgataaatgcgccatctgctattggtatggaaagtgtaatgaagaaaatccgtgtgatgatttcacaccgattgacgacagtttagatgaggatttctattccgatgtcgtaagggaaaattacgaagagtatcaattgcttgttgaagagcaacagttgtaatatacatgctttttatataaaaattgtggtgattctaatgtttaactttaggaaatgttcgagattggaagaagaacgaatcgctctattgcaagaaaaagaaaggcttaatgataaaatccatgagcaaaatcgtcagttatctgatttgaaacacgattatgagttagcttgttctgaagtaaagagacttgcagatgaaatcagtgctaaggttgaagattgccatattgggccttggtgtgatgggtgcgagcacaaaatgaaagctgtcatgaaaaatagagaaataagatataatggcggatgggtaaatacaattgatgaggaagaatctgttgtttattgtggaaagcacctacacgaaatgtgcccagagtttgaaaaagaacatgtcccacattgggcagtgtaagcgatcattatgatttagatctattggtaaggaagtgaattttacatggtaagtaaaacggatttgctgcaaaagaccagtgaatatatggattatcttgcagaacacaagaaaaatgttcaaaaagcctgggacgaattgaaaaatgctacaatgggcgttcctcttcttcagcgaccttatattgtggacgaaatgaattggagagtcaaatgccatgatgacagcaagttttcagaagaagagttcgtcccgtatcgtcaacatttctatcctgttgatggtgagcaggttgaccaggcagcttttgataaggcgtggaagattcattgcggaagaaatgatcatcactggcaatactgggttgatgaggacggcgggtttatttcttcgtacagcgtagacacaaagatttgcgcttacctcgaaatgatttgcgattggcaggcgatgtcgtatgttcttggaggaacggctgtgacttattatgaggccaacaaatcttcaattcagatcgacccttattggagagagttctttgaagaggttcttgctcttcttggtgagtatttgacatcgaaacagtgaggctgcgtacatgaatagggaacagaaacgggagcagcagaaaaatttaagaaagcttgggatcgacaagcgctcatttgatgtgcttgtcggcctacaggcaatcaagaagtcaacacagacgattcaaagcggagacagagtgaaattaaatgttgacgcaattagaaatggcaaagattatgatcgcctttctgatttgtataagaaatttgttgctgatcatgaagacgatgagtttacggcgattgttgatgatggcgttggtaaatatggcaacctgttttcgttgaaagaagatcctgccggctggttgttttggagcggggatttaattaaggtttgactgttagggggagataggtataagtctcgataagcagattcatatttatagctttgataccagtgcattttatacagatgaagaaaagcagttggaaaaaacaattaacgaccactgtttatgcaagaataggctaaaggctgagaaagaaatcctatctgagtaccactataatgggctatctctcgaaaaggcagaggcgaggtatcgcaagctgtataagataccaaaagattctccagtttgtatcggagacaaagatagaattcgtcagattacgaaggagataaaaaatcacaatagcagcattaagccgctaaaagatgaattgcttcgtctgttacagtctcacagagctacaagaaagcttcgggacgaatatgtggtagacaaaaatgtgatttcagtctttgagtcgatgctgaccaggacgcttggtatgcaaactggacaactctacgatgatttcatggtgatccgtacatactattttgatgtgattgaagacctaattcttaacggatatctttacaatggagaaagatatgtgtgttttactgcgtctgccggccagatcaggacgaagaagaccgtattcatcaaagagagtgtgtggaagaaacaccagaaaacgcttatgtgcggtcttactgtagattcgatcaatgagcatggtggaatcaatatcaacaaatacctcgcatacctcgctttgtgcaatagtgcaaccgatccttgggatgaatttgatatcacgaagtctatcgtggtagacgatatggaaacgatggttcatggagtcgttgattttatcgatcatagaacatatactgcggagcggaaagaaatggatatcccgattacccatacagatgggtgcgggatggttcttccgtcgtgcaatcagaagaacactatggtacggcttccttgggtaaaaggtcttcttgccgtgttcccatatgacaagttcattatggaagcggatcagaaagagcctggagtccgccatggcatagtcaaagatatctatgggaaagaacatgatattcttgaagagggcatacaggttatttttacgaagagccagttcaagatgcacaaatactattcaagctgggaagagtacattgcgatgtaccagaagtatgggtgcagcgctggaaaatgcaacgaggaagagaattttttgcctgatgccaagctgaactaccagatgcttcagacattgactgatataacgccggatgagatcgagcagcttgcggatcgctcggtcaataagattttgaaaatcgcgtcggacagagagacgatgcttgatgtgtttggggcttcgtcccaatatcaaaacaagaacgcttttcaggagtgtttaagcatatacccagagcttctttcagacccgtacaccaaagagatgttgcggcaaatcaaaaagaacctggttaaagagggcagggcagcgaagctggatttatcagcaaagtatatgttcctcatccctgacctgtatgctttttgccaatggctgtttcttggagataaagacccgtctggccttttgaaagacggtgaagtgtcgagctacttatatcgaggatgcgaaaagcttgactgcttgaggtctccccatctatacagagaacatgcggtgagaaagaatgtcgtgacgagggagacaaagaagtggttcactccaaatgcgttgtatacaagttgtcacgatcttatctctaagattttgcagtttgattgcgatggagataagagccttgtgtgcgctgatccattgattatccagattgcggagcggaacatgaaagacattgtgcctctgtattacgagatggcaaaagccggcgcagtcattgtaacgccggaagaaatcttccatggattgcgggctgcgtggactggcggaaatatcggagttatcagtaatgatattacgaagatttggaacagtgacgatgttgaccttgatgcaatcaagatcctttgtatggagaataacttctgcattgattatgcaaagacgctctataaaccaaccaggccagaccatatcaattcgaggctgtcaagaatcactggaatgaaagcgccgcatttctttgtttatgcaaagaataagtcgtcacaccaggttcaaaaaatcaattcgagcgtggtcaatcagcttgataagattgtgcctaacaagaggatgtcattttcggccaaaaatatcggcgcatttcattaccaatatatgcttagcgaacctaacaaaaaggtttcagtattgcaagatgttattgatttatacaatgaggttgaaaggcagtatcggtattcaatcagcttttatgatgacagtgcaaactttgcgtatgtgagtgatagtatccttaacaagtttgagtctttaggatatagcatgaatgatgtttgtgacacgctggttaaataccttttccatatgaagcagagcaagaggaagaatgttttttggatgtgtttcggagatgtggttctggaaaacttaaagaggaatgttcctgctggatcaattcagtgtagaaaatgcggggagaggtttgtaccaacaagtccacagcaaaagatctgcacaaaatgttcttcatatcaacctgttctaaagcggattgtgagatgtattgattgtggaaaagagtttgaggtaagtagttctgtcagaaacaagaagcggtgtgataaatgccaacaacgaagagtgagagaatatgagcgagaaaagaagagaaaacagcgaaaaactgtatgaatgtccccatgtttaatttcgatgtttcatatactgaaaaagccgtttttcaacggcaaaatatgctttgccataattggcaaaatcgcatattttgtcattcggaatttgcaaatctaaccgttgattaacgattgtttcacatccaaaatagaaatgtccctttaagggaagaaaaccgtttttattaagatattcggtatctcctgtccatctggccgtgggaatactcacggcctgggacatttttatgaaaaggattgatttattctatgattccagtaacaaaagaagaggcaaagttactccgggagctgtacccagagtacaaggtcacgcggacaatggttcaggattcaaaacgccaccattactatgcaacagagcatgagggaatgatgagggcgattgctgatacgaactatgcagcggccaacatcgtagcgcaaatcgataaggaaagggcgcttcgcaagaaacgagcagaattgcaggagcgaaaatatggctgatttcgagcggagagaaagattcgacaatgccattattgatctaagcgatatgacaataacggaatatacggattgcgatacgaagtgctatgaccttatgaatttactgaaaagatgggatggggtggttggaataaacttaaccattgagcgttgcgtcccattaccacaggatgggagggacacagcttgaatccgaagtatagccaactggaaaatgaagactcatatgaatatggccttaggttgattgaaaccaagatagagcaaaatccacctgatcttgagtggtcagatattgtggatcttcttggactcgatgtgcattatgatagccttagaaaagcggccaatgtgaccccgtactgtggatatcgggttatgaagtatttcaaggagaaatacgcaagcgagtcatgcggagaatcgtatttggacgagcttgaccaaaaaatgttggagttcaaaaaggaacggcaaagattttttgaccaaagaaatgctctcaacaaagttgtaagagatatggcaagacgtgatgagaaccaagagatccttgagagagcgattgagaatggtgttttgccgaagcttacatatacccagaacaatgtgcaacctacggagcaggatctgcttgttagtctaaatgacttgcattttggagcttgtgtcgataactattggaactattacaactctgatgtctgccgtatgatgctacaggattacatagggaagattgtctccattgcaaatttgcatggggcagagaattgttatgtatgggcaaacggagatctaatcagtggaaatattcataaatcaattgccgtatcaaacagagaaaatgtaattgagcaagttgtcggtgtttctgaactgatagcagagttcttgtcagaactgagtccatattttaagaatgtttatttctcttcagtggcaggaaatcattctcgactggaagagaaagaccttgcatccccgcatgaacggcttgacgatttggttgagtggtatctaaaggcgaggctgcaaaactttcagaatgttgtgtttgacaactacgaaaaaattgacgacaccatgtatctggtcaatataaggggcaaaacataccttggtgtgcatggagattatgacggatcgccaagcaaggtacagtctcttcagaccatggcgcagcgtcccgtgtatgcgattttgtcaggccatctgcaccacaacaagattgataatgtgcagggagtaaaaacggttatggccggcagctttcttggcatggacgattattgtgtggggaagaggatctatggctcgcagcaacagttggtttgcgtttgcacatacgatgggattatggcctactacgatgttgactttgatacaaacgcatatcgtcaacaaaggagcgaaatcgtggcgtgaatatcaacaaaacagatttaattaacgcattggcagaaaagaaatcgtataagaaatatgcgatcaagaatgcaattgacgatatttttgaagagattgcagaagctctcgttcgaggggataaggtatctatcagagggttcgggacatttgagctaaagatgttccaatctcatccagccgttcaccctggaactggagaacgcattatggtggaaagctataagaatgtcgttttccgtccaggcgacgagctgatccgcatggtaagagaggaaaaataaatcgggggagcaaatcccccgatcaatttggctgagtagagaaggtggtattcttgcctgcctcataagcaggagacattggttcgactccaatctcagccaccaaaaaagaaaaataaatttgctaattcctattgacaaattcgttttcatctggtatagtaatacatgtcaacaggagatagttaatcaatctcaaactgctggcgtagctcagttggtagagcggctgatttgtaatcagtaggtcgggggttcaagtccgtccgccagctccaacgacatcgaaccttgaaaaatcaatatctgaatcatgcttattattaactcagtgaacaaagcgtgtcagcgctctgagacgcgcagtaacttccgtattgataagtagggatacctgcttattggtgcggctcggatatagtgatatatcctggggagacggaaaccgtcaacaagaatgcgtgttgccaagagttgtcgcttcaaaatgcacggaactttcgggtgcaacaatagacgctcctgtggagaataagcctaaggggttatggtgtggcagccataatgacagaggtaggccaacaatgcacctcgtcttgatgccaaagaaatttggctataacgaaagtcgccggttaaagtagccgtatgacgggtatgaagatgatctttctttatcaaataaaggattttgtaaaagaaaatttctgaaagaacggtgaaatttgcgggtaagcattcccgcacaggtttatgtacgcagcatggcttatcctgttgcgatactggggtaagaagttaggggtcgctccccgaagctcagacttatcttcctggtggcagaaaattgtaagaagacaatggaggtagggtgaagacccagtgataggtatgattgagctattgattttttcaaggagttagttaatctattttaagggagagcagttctatgaagatcagcatcagagagaaagacattggtatgtttaaggctatcgatgtatcatgcaaggatggcgtgattgttctcgactttgactgtgccaattgtggagtgcctatggtgaacagtaggccgattgtcccagttccaatggtgtacccgctgaaggatcttaatcatcttacatggagtgagattgaggcaattggcgctgcgggaaaggctcgtgagacctttgcgcttggtgccacaaagaaagaccatatgaagaatggctatgatgctgaatggaaaatcattggatttgaccatgatgatctggccgacggaagcggcaaggcaccgatttcgtgggatatggttagggcttacaaagatgagtggtctatgaatgacgaggccacaaacgccggcggctgggatcagtgcaaggcaagaaagcggatggacggagagctgttgtctctttgctctgatgagctacaggctattatcaagcccgttatcaagctgaccagcgctggcagttgcagtaaggatattatcaagagtatctgtaagctgtggctgaagagtgaaaaggaactgtttggccgctgtatttactctgctccaggagagggacactggtatgagtattaccgtcaggaggatgtgccatactttgcacttgatgaaaatggagatcgtgtgtgtcagtggctccgctccgccttttgcaccgctgacaactatttctgcaatgtgtggactgacggctcggccacctatggcattgccaaccgttcaggggcgttgctgcccggctttagttgctaatcttttatctaatctgcttccgcctcgaaaggggcggagcaatatggggctgtagctcagttgggagagcacctgccttgcaagcagggggtcgtgggttcaactcccatcagttccaccagtaatctgtgttggttatgttgacgcttgtgcggttcagctcattacttgactgctatccctgtcaaaaacctatcggccatggacgaggttcttcggacgcacagtaatttcgagacatagctcagttggtagagcgcacgactgataatcgtgaggtcgaaagttcaattcttcctgtctcgaccaaaatttaatatggggcagtaatgggttcgacggggttttgagagtgcaaaacacgcaggtatgataccgccgaagggtcaaaataaaatgaaacgacgaaactgttgtaatgattcatcctgcttttgctgcttttgcagaaagccggattgccgcttgagataacttgagcatccaaaacagcgaacttggcctggtaaacgcttgaggatagaagaataggccatttggtttccttgttacccctacacaaacaaggtggtggaggcgataccgttccggtacgccctgggtaagatgtgctggcatcgtggcacccgccgacaagcgaacgcttaaaagctggctattgcgtaagaatgttttgctcatgtaggaatttcggacgcgggttcgattcccgcctgctccaccacttatctgggtgtacgtcaattggtagacggcgtgatttggggtcacgaggctgtgggttcgagtcccaccactcagaccaacaaaaacattggaggaaatacaatggatcgatttgctgttacaactgaaaatggtgtaatgcatctgtattatccttcgattgacgatgcgaagaggtcatggcctaatgcgaggattgagccttatgatgacgatggctaccttcgatgtatagatctcctgattgacgcagcggacgactcctacattgattatagaggaagaacggttttgcgacgattatttccatggggagaattgaagctgcgacttacaagaatgggcgatagctggtacgacatgtgtgaatttcaagaacaaaacaacaacgcccatattgtgaatttcatgtggactttatcagatccaaaattggtatgggaaaagttctttgggtatgaagttagatatgagttgcttcaatgtgtatgtaaatcctacggacaaaggccaataaaaccaaaagaactaaagggtatgaagtcagtattcggagtcaaattcataaagctgaaatctcaggtgtttgtgaaagacaatgatatctacatatatcataacgaatacttttgccctgagatgccgattgacccagcggattatggaaccccattttcatacagagcgaataagtatcttggtaaaaacgcatccaagaaattcatctatgatgataattgggggtcgattttacttcataatgtggcatggtgcaagttcgtaaactttatgaagttgtttgaaataatgaagccaaatgatattgctctccttatgagagataaaacatatgattttcataatttcgataaaaccaagggagatgcatttcaatggcttgcgttctatgaacagatctgcaacgggattgtggatcatatgaagtgatttatataaggcacgaacagcaatacttttgtaattcttactcttcaagaaacaaagtgtgccttggatgttgagacgctaacagcaatattaacagaaacaaaaaaagatgatttgggtttatctttgtgtaagcgcttgtgcttattttcaacaatgcgtctcgtgggatgatattggcgtgtagctcaatcggtagagcatccggctgttaaccggggggttgcgggttcgagtcccgccgtgccagccaaactaaaaagcaggatagaaagcttttatagcgtgatcgcagaaggacactcacagcaactttactacacataaattgggcttatgaatgtattaaagtgtcttggcgaattgctatttttggaactatccatatattgcggggtagagaagcggctatctcgtcagcctcatgagctgaagatcacaggttcgagtcctgtccccgcaaccatgcccgtcccacaatcagagcggagactgtaaactgaatgggaaatagaaaccttcacattctggcagtgatgacttttacaaggttttgggagcaaaaccggcgcaattcggcaggcgaagtacgagccgacaccatggcttacggtgtgagtaggccaatttgcccggttagctcagctgggagagcatatgccttacaagcatggggtcggcggttcaagcccgtcaccgggcaccacaatatgtaggtatggtgtttaatggtcagcatatcggtcttccaaaccgagggtgcgggttcaagtcccgctatctactccatatatgcgggtatggcggaattggcagacgcgccagacttaggatctggtgggctatcctgtgcaggttcgacccctgttacccgtaccataaagagcacatacagcaattttatacatggaatcaacttttaactgatcaaaccaaacaaggtgctctgtgaaaattagctggcgtggtggaatggcagacgcggcggactcaaaatccgctggtagcgataccgtgtgggttcaagtcccaccgccagcaccaactatgataccgtagccaagtggtaaggcactgggctgcaaccccaggatcataggttcgagtcctatcggtatctccatatgcgccagtagctcaattggatagagcataggacttctaatcctaaggctgggggttcgattcctctctggcgtaccatccgtgtggtagtaaaagcacgatcaataaaataactacgctcgtttgtctctgccacaaaggactggatggtatggcctggtcagcgagagatcctgtttggagaatcgggagtgcaggcacggtaaaagtaaaaccccgcctttcggcggggcgagagggtcaaagcttaatgccaagtttttcagccatttcttctggagtcatgttggcggaagcttcttcgataatctttttcatcttagcggggcgaagaagttcttgcttctttgcttcaagagctgcgatctttgcgtcgatttctgcaattttgtcttccacagtgcgacgagtgcgttttgctttttcttcagccataatacattgcctccaatcgatttggttattacatttataccatactttgatacagaatgcaacatccgataagaaaatattggggtatcgccaagtggtaaggcacgggactttgactcccgcattcgctggttcgagtccagctaccccagccaactatcataagacgctggttctgttttgtgtaaaatagatgtcacaccaagttaaaactataaatgctcccatcctctaatcggaataggaggctggcctctcaagccggtaatacgggttcgagtcccgttgggagtaccaaatggtgccgtggacgaattggtagagttgccggcctttcaagccggagtttgcgggttcaatccccgccggcatcaccatgaagaaagggagatatttgtgccaagaaaatctttgacagaaaacgtaggaagtaaacagagaatagtacgaaaaattccgtcctcagaaaacggattgggcgtacattgtacgacaaaatgcggacaagaatttcagatcagccagaacaacgaaaagagaaaacatacactatggaaaattgttcctggtggatttgagaagattgccacaggggattcaccgtatgatctatatgataaaatcccttgggacaagtaatgaatgccgttatggtggaatggcagacacgccagcttgaggggctggtgggagcaatctcgtatgggttcaagtcccattgacggcaccagtatggctccatagttcagttggttagaacgccggcctgtcacgccggaggtcacgggttcaagtcccgttggagtcgccaatataggggtttggtgcaatggtagcatgacggtctccaaaaccgttgatgagggttcgagtccttcagcccctgccaataaagacacatacagcaatatcacatattttaagtattctttcaaaccatctcctttctttctacctccctttctctattgtgtcttgttatggctttccatgccggtatagctcaattggcagagcagcggatttatgccccgtagcgccagataagcggcaggttgcaggttcgactcctactaccggcaccatgcgccacggttaatggctaaaattctaccggcaaataaacaatagaagccccgcataatgaaagcgatttaatagggtgttcggcgctaacacataggggagcgccagagtcggagagctggggcagtctgtaaaactgttgctttcgagctgagtgggttcgactcccacctcccctaccaattgagattatggaggattaggtatagaaagatattgtgtgaattgtgggtgtaaaatttgcagagaaaacacatctggatattgtatcgattgtcttagagccaaaagaaaaagagaaaagatagaaagatggcttaaaataggagatgcaaacataggtgtatcaacaacattaagagggtgtatcagacaatatattctggacgatcagaatggtagatgtgctatatgtggtatagataatttttggaatggagagcgtttgaattttattttagaccatatagacggggacgcataaaataattttagaaataatttgagactgatttgccctaattgcgatagtcagcttcctacatataaatccagaaataagaattctgcgagggtgtatcgtagagcttcttaacatacggcggaataccgaagtggtcataacggcgcagtcttgaaaactgatgtgagctaactactcccgtgggttcgagtcctacttccgccgccatactccatataccatgttgtatattggagccagggaaatcgtatggcgatttccctcttatatggaacgatagcttacgaggtctgagcggcggtctgaaaaaccgcaggatgatggatcgttaccatctcgttccaccataataaaaaagacatgaacagcaattttatctatggctacataaaagcacattgccgtgtgcgcatgtcttgtgcctaaagggagtcaccaactggcgttaaataagtggggcaaccgtgcaaaccgggtaaacttaatatgcgctcataactcagttggtagagtagctgccttttaagcagcgagtcgtgggttcgagtcccgctgagcgcaccattctacgacacactttttgtgtgtcgcttttttattattgccgaaaggaggaaatggagtggcaaatgatttgaaaaagggagccgcagcaaaaacgcagcgccctgaacgaatgaatttggagaacgacgacaaatacccgtatcattgcagcgcatgtggtaagggatatatgcgacagaaggataattttaatgtcaccccgtctccttattatgcaggtaatggcggttatcttacgatttgcagaaggtgcctggataaatcctttgaatactatcgtgatgaggtgtttgacggagaccaggataaagcgatggagcttttgtgcgcgacgattaacacctgctttgatgaaggagcatgggcaaatgccaaaaagcacccgtctccaaacagaagtaaggtaagccaatatttttccaagttgaatttggcgcagacaaagggagcgtcttatgcagatacaattctttaccgcagagcaaataaagtcgaaaacgcagagacaattcaagcggtaaaagataatcccaaaattatgactccgattgagaccatccaattgttcggtcttggattcagcgaccaggattatgaaacgctacaatatgagtacgatgattgggtaaagaaatacggtgatcctgaggataagcgtcaggatgagctatataagagcctttgctatttgaaattacagttgcagaagtccgtgcagaatggagactctggaattggagcattggcaaagacctacaaagaatacatcaatgcggcgacgactgagctggaggatcgccggcagaagaaggaagagtccgtccagttgaatcctcttggcctatgggcaagggatattgaaaagtataccccggcggaattctacaaggacaaaaagttgtttaaggactttgatgatataggaagttattgttctcgctttatttttagacctctgaaaaacctcctaaccggatcgaaagagcttgataaggaatacaagctttcccaggaggaatgatgcgatgaactatgatgttttaatggatgagcggcaaaaacatttgcatgaacatttcccgtctacacactatttgcataaggcggagaatgtccagcgtgtgcttttgtggctcactttttataggagaaatccgtcgagatttgtagagcactactttgggattgttttgcatttatatcagcatatcattctgtatctgatggagtattttccaagtttctgcattgtagctgctcgttccgcagcaaagtctttccttattgccgtattcgcttgcaaagaggcgattctacggccaggggcaaggattgttgtggcatctgctacaaagaaacaggcaaggctaattgtatcagaaaagattaaaaaggagcttttgcccaagtcgccgttgctcgaagcggagatagatagttttaaggataaccagaatgagattgaggttatttttaagaacggtagctctattgtggttgtcgctgcaaacgagaatgcccgtggttatcgtgctactgttatgatctacgaagagttccgtatgattgcgaaaaatatcattgacagcgttctttctccgtttctattcgttcggcaagcagactatttgaaacaagaagagtatgctggaatgcaggaagagcctaaggaagtgtatatcagttccgcatggtatcagaaccactggatgtggaacctgattcaaacatttacaaaggatatgctgtctggaggtacatcgtgtgttattgcgatggactacagcattgctttgaaacacaacattaaaaccaggaacttcctaattaaagagcgaaagaaactcgatccgatgtcctgggcgattgagtatgagaaccagatgattgcggaaaatgccaggtctttctttaactatgatcagttgaaccgaaacagaagactaaagcgggcgttttatccgcgcagaaatgatgaagctcttttgaagcaaaagaacaaatacgatattccaaaacaggtgggggaaatcagagtattgtcttgtgatattgcaatggagggcggaaacgatacggataactctatcttctcctgcatcagacttttgccagaaagccaggagcataaggtgatggacacagccggcgagcatattacggttaaaagaggatatcgccgtcaggttgtctatatggagtctgttcatggaggggagaccactaagcaggctatccgcatcaaacaattgtatacggattttaacgccgactattgcgttctcgacggacgtaacgccggtatttccgtttatgatatgctcgcaaaggttttgtttgatgaagagagaaacattgaatacaaaccatggaaatgtatgaacgacgaaaaggttgcgaacagaattcagattgccggcgctgaagagaatgtatatgtcattaaggcacaactcgaaacgaacagcaatattgctgagtccatgcgtaatgctctgaattctgggatgatcgacttgctgatcagcaatactgaggcggttgatgagatttctaattttatcccagaatatgcgactgctgatgttgaagcgcagctattctttgaaagaccctatatagaaacggttgctttaatcaatgagatgatcaatcttgaatatgagcgaggcgatcagactgggttgatcaaaattatgaacaacaatgaccgtaaggacagatacacctctgtttcttacggtaattattttgcccaaatgcttgaacatgatttgttgtccgatacggcggagtacgaatatgttccactatttaactgaaggaggtgatgaagttgcagagtgaaaagaaatggtatcagttctggaaacgagaccgtgtgtacgaggaaaatgctgtcgttaaggctgaagatcatacccacgagttcaatacaagtattggaagcgcatatatcaatatgctttgcgggtcaagcgaatctccatataccattcaggagatccgtgcttttacgaaaaacccaatgaaccatattacggagctgcgcagaatggcaaagtgggcttaccgaacgaatggcgttgtgtctggcgcaatcgactatatgaagtcaatgcacacattagatggtgttattgtttctaagtcacgccggccagatggcagaaagccaagaaattatcgttccaataaagcaaaaatggaaggtacactaagcaccattcgatacaagcaaattatccgcgatggtattttcaagaatgccaatgatggtatgtatgtcgcttactttgaaactgctgcgaccacaccagactatagaatggcgctgactgattatgaaatccagaatataacggaaatcaatgcgcttggaatcaatgcaatggtaatccctcttcctgttgaatatgtgcggatcattggaagaaagaacaacagttatgttgtcgcatttgatttgaagtattttgattatttcacggaggatgcaaggaagaaaaagcttgccggctttccaaaagagatccaggatggatggctgaaaaagatgaatggggagctgaacgcagattggcttgttcttgataatacaaagacaattgtaacgaaaatcaagagcgagatttctgaaccatacggaatcccattttctattgcagctctcgacgatattagctacgctcaatattttattgatacgaagcgaaatgttctggactctgtaaacaaccaaattgtgtatgagacattccctgagggcaaagataaggggacatctgctctgagcgaaaaacagcagagacagcagcatgatttggtcaagaacgcactttccagcaagagcagaaacggcagcagtacatcatttttctctcttgcgagtgggacaaagcttgacaagatttcgttggatgtttctttgcttgatgaaaagaacgaaaattcgattgtagattctgtaaacaaggatatcagtgtgagcgccagcgctcttgacggcagcagcactgggaactactctacagcgacattgaatttagagcttgtcgcagcaaatgtgtattcctggattgaggatattgtggacgagctgaataagtgcatcaataaaaatatcattaaagatccaagttgcagagtcgagttttatattctgccaattacgatggtaaatcgtgatcagatggtagggtatatgtctgatctctatgcaagaggaaagggaagcctatacgcatggattgcgtctactggaattaacccggacaactatgttgcgttgatggactatgagctggatgaagactttgagaataagtacccagtgcataggacttctttcaccgtgaccggtaaagacgatcctgaatttgaggatcacaacaaaggcggcagaccaccaactaatagcgaagatcctgctgccgtgcagcaaaagacaaacggtggtaacaatatgccgaagccgtcaacggggtaagggggtgagaaaatgaatagatgtattccgactggtagaatttttgaactctctaatgaacgccagatcacgggaagaagaaaaatcaaggtagttcttcacgagattttctctaaccatgatgagtggcaggagaacggtatttcctgggatgagacctatacacagcagacgattgactccgtttctaatatgtctttgtgtgttgaatttatcagcgaagacaggacgctaccatatgggcatgggctaactgagattgccgatatgccttatatggaagatgcgactgtcgttggacacttcgagcgcggttatattgacgatatcgaaattgacggtgttacaaaaagggttttggttgcagatggatatgttgatgaaatgagataccctaagtttgtagcatggttgaaagatcggcttgaacatggaacggtcaaaggttctgtggaaattgtaggtagaccagaaaatgaaaatcgtattatttacgatggcggttacaaagagaaaggaagaatcccgcaaatctatgattatagcgggtatgccattcttggtatcagaccggcagatgatacggcaatcgtcatggagttaaataataaatcacaagaacataaggaggaaacaggtatggatgagaagatgatgagccaggcagttgagcttatcaagtcttctgtaactcagaccattaacgagttgaataataagagtggcgagtatgagaagaagattgctgagctgaacgatgcggtggccgcaaaagacgctgagattgcagagctgaacgagaagttgaacactgccaatgcgtctgttgctgagaaagaccaggctattgagagccagaccaatgagctgaatagtctgaaagaggccaatgccgcactggagaaagaaaagaagattgctgagctgaattctgctctggcggagtttagccaggaagagcaggatcttgccaaggctgagatcgaggcatttaaggccgatcctatgtcagttgagattaacagcatcacaagcaagatttgcgtggagatggttcgtaagaacaaggagacacgcgcagtcgaattgaacaactctgctcccgacattttcggcggtgtgaactcccctgaagatgacggcgatgtagacatttttggctaattaaggagggttaaaggaatgaaatacaagactattggtgcatttaagaatgtgcagaatatcccatattgcaaggcaactgaggatatgaaagtaggtatgggcgttgtgcttgaccgcgccgcaaagaccgcatctttggcagaggatgataccgctgcaaaggctattgttcacattgtcaccaacatcaatgacaagccggagcttcacaacagccctgagacttatgtggtgaacgctggcgagtatgtacgcgctgacgatcttagaactgtgaacgggcttgagattgagttcgctgcgtttgagattgacggcggaactgatggcctggccgctggcgatgctttggtatttaccacatctggcctggtgaagaaggttgctgacgcaactggctatgcagtttcctttaaggtgattgcaaagaccgcgtatatggacgatggcattcttgctgaaatcgttgctcagtaagaatttttgtttctaaaaggaggatagaagataatggataagatttttgagcttaacacagtcaacaatgtgaaagactctgttgttggttctaaggtaaaggccacctctccaatcgtagaggtgttctctgctctggcacagggtaaaaaccccgctgttgacggtaaggtagtagataaggctgttgcctatatcaaggagttggctggccgcgcaatcgacggcgatcatcaggcagtatctgagctgaacgcaattcagcgttttaccattgagcctaagctgatcgaggctatcaagatttttaacttcatgggtacatacagatcccttccttacgacaccgtgcctatgatgaagacctataagtatgagagcattgattctcgcttccaggcttcaagcggtgatgtacctttcgctacccacagcttccgtgagtacccaattgcaacacagactatttctgccggttatgcggtggactatcgtgagttgcagagcggaaactttgacggaactgttgctgagggtatggctcaggtacagactgacatgcagaataaggctgtgtactatgttatcgcaaagctttatgatgcactgaagaacgcaaaaggcgtaaagcacttcgctgagagttctggtattacccagactgccgttgacgatatgctgaaggtaatgcgtcggtacggcaagaccaatatctgcggcgattacgctgtggtttcccagttgaatgatttcgctggttataagactttcggtgcttccaccattccgtttggtgctgatgcggttgccgaagagattcgtaagaccggtttgctcagcttctacaacggttctaatgtggtggagctgccaaacgctcttgattacacccgtttgaatgaggacaagacttcctatgagctttatatgcctcaaggtttgctgttcttcattcctcagggcaacatcgcacctctccagatcttccgtcgtggcggactgaccactatgactggtgacgatatcgtaacccgtcagcacctgacccgtttcgacatggagattggtgccggcgtagcagagggcatggaggatcagattggtcttctgtctgataccaatttcgaggttcctactctttaataggaattagttaagttatctaaaaggggagggaaatactctccccttaatctttttataaggagcgaaagaaaatatggaattaacagataaggttgcaatcaacaatctgtgtagctgggcgctttattttaagcgtgaaaatggagtgggtgatatccgcatccccgcaaatgcaaagaatttttcccagttggatgtagctgaggttcagatgcagattcagcgcggcaatcctctgtttgtaggggatggcagatccaatcagggggatcacgctcgtttgtttatcgtggacgataagcagcgtaaggagcttcttggatatggagaagagtctgcccaggatgcggttgttctcaacgaggaatctgtaaaggctcttctggcgattcgtgggaaagacgcatttcatgcaaagctgaatgagcttgtaaccacgccggcagaaaagaagatgattgtccagattgcaaaggagtgcggcggagacgatgtagcggcctggaagatggctgcaattaacgagcttgccgacacaaacaccatttaagtaagggggatgaggtatggatcagcctactacttttacggatattgaaacaagttttcactccatgcctctaacgaaatataggatcgatcctggcctggagaaacagtggttagaaactgcgattgcagattacgaactcgatctaagcactgtgcttgaatacgacagtgaaagcgggtcgtttgcaaataagcttgatcgccctacagttcgcattcttgctttgatgatgtatgtcagttaccttcaaagagaacttagccgcgttatggctctcaacggtatttatgccaaagatattcaggttactggagcagacggaacaaagcgggtgacgaagcaagagcttgatagtgagcttagcagagtgaacacaatgcttcataaactcaaaaagaactgctttgattaaggaggggttgcaatgccagaatcatggtatttaatgtcccaacctttgtttaacagcggttttgagggcgatgaattctctgcgtttgcacaagggggatttgaagaaattttggattctccacttgcggatgaaatagagatttatgagaaaactctgtctgctactccggtttctgcacgtgcgattatacaaggtgtgacagcggacaattataacaatagtgtgctgcgtcaatttctttgtaagattgggacacttcggagcggacagtatatcaaggcaagaggccaaatgtggcttgtttattcgctccctgataacaataagatgtacgaaaaagcgattgcttggcagtgcaaatattcaatcaagtttgtttcaccgaccagcggagaaattgttgagtaccctgtttatgatatcaatagtacgcagtatggctctggtgaaacatctgaagaccatttgacgcttggcacatcgcagcacttaatttacatcccatataacgaagagacgataaagcttgacagtgggtttaggttcctcattgataaaaaccgtgataacccaactgcatatcgtctggcgcaagttgaccctggcggatattcctgtgggaaagatgacggcctgattcaatggacaattgttgaaagccaatttgacgagaagacggatagcaaagaattgatggtggctgactattttggcaaatcggagttgtctaagccagaacaaccgtcagaggttggttattcaattcgcgttaatccagatggtggagacgcatctatcatatttggagaaacactaaaatcttccgttattatttgcaaagacggtgtagctcagagcggattgccatttgatgtaacaatcaccgatggcgcagagtttggaacaattcagtctgttgatcaaaatggctttgtgctgtatgcgctgaacaatcgtgattttattggacaagagattacagttgaaatcacaagctctgaatgcgaagcatcgagcaaaacagtatttacggttagggggtggtattgatgtattttgaacaagtccctgaatacagagataccatcatggagagcatttgtaagtgcgatgccataattgatttgattcggccaactgaagccccagagatgagtgcaaaggaaatggcctacaaatatattttcccttatgatttcattgtggggaagacatctgaagttggaacttatatttgctttgatgttatcgccccaagaattatcaatcgctcattctcagatttcaatatctatatttggattattgcccatgaaaggactatgagaaccccgaaagggcttgtgacagacctactgacaactgaggttgacaagctgattaacgggagcaatgggttcggccttggtcgtgtggagcttaaatcgtgggatagatttacgccggctgaggattttcatgggagaacacttgtgtatcgcacagtggatttcaataggaaataacattggaatcaagagatcttgatctgagattgtgcgcaaaagatcctatttttgttgacggagttcctatctacccaatttcaattaaggaaatttctcgtattggctatacaaagtacaatactgatatccgctttatgtctttgaatgaaagcgatatcggcgctttgcttggcagggacatatccgatataggctcatttaattatctggtcggcaatgcgattcatgataaagagactatgcaaatgatgttgttttggctttccaaaatcacacatagtaagattaccttttctgggaagagactttcttttgtcggagatgggttcgagatcacaaaagataattttgatgaaatccaatctattgttagactcagaaatggcttacaagggatagaagaagaggaagaaaatccagataacgaggctgctcgtagggtcttgcagcggagaaaagaagagcgattgaaaaggcggaaagcaaagagcggcggagatgaatcctctttgacgcttgctgatctggtcagtatattggcaagtggaatgggaatgacgatggatgaaatcatggagtatgatttgtaccaattcaatgatcagttcaatcgtctgaaaatcatggaggattatgaagttaatgtccaagcgcttttacatggcgctaaaaaagaagatgtaaaactcacgcactggatcaccaagatcaagcgcgaagaagagtagtttggaacagtctgggaaaccaggctgtttagtttttttaaggaggtattgtaaatgtctaacgcaaaatttggcgcaaaagaagtcatggacgttgtgctctatgatatggagacaaacaagcctgttatccagtttgacagcttgaagacttcttcaattagcgtaacttctgagaaagtatacgcaagaggcggtaagggcaaccctaagctgattacatgggaaatcaataaggaggccactctgaccattgaggacgctctgatttctccgaagtccctggaacttatctctggcattgctcgtaaggttggcgtacagaccattcgtatgagacagactacagagtatgatgagaacggcgtaaataagggcagcatgtatccgctgaaggctgattccaccggtaagattaccctggcatttgagcctaacaccacagcagataagatcttggtgtacccttatgattctgactgcgaagagactgccctgtacgacatggagggcgctcagctttcaggcaaggagcttacggttgctgcggctaaggatcagcgtgttgtagtgtactacgactatgacagcgaagagaccgccgagacctatgtgatcgacgcagagcatttcagcggtacatacaagcttgttggagataccgtgctccgcaaccagaagaccggtaaggatgaggcattccaggttactattccgaacctgaagtttacctctaaccttgagcttggttttgctgccgagggtgatccttctaccaccacatttgaatgcgagatcatgcgcgactctgatactggcaccatgattcaaatggtgaagtattaagagttatagatttgaatatagggagggcgaaagctctcccttattctttgaaaatggtttggaggtatggcaatgagatataagatttatgtgaaagatgttctttccactgatagcggtctatgtgttgtaattgccattctgaatggtaaagacactcaaatttgtcttcctaaagattgcggaatcgaaaagtacattggagaagaggtgtattatgagattaagggcaaaaaggttcgtatctcaaaagcgcatcagccgcaagtctgtgtagagactcctattgatgaagaagacgagaaaggggaggaataacctctcctttttctttgtttggaacggaggatggtttttattaaaatcctggctattgaccaggcaagaaatggagcgtgggcgatatttaactacgacacaaaagaacttgaaacatatgggacattttcgtttggaaacaagaaatacacttacgcaaaggcgattcttgccatagaaacattagttgacgaactgataaaagagcatgatatatccgctgtgtttatcgaggatattcaattgcgtgtaaatgttcagtcgttcaaaaaacttgctcagctacagggtgtcctcgttaatctatttgagaaaaacgaatacctgtatagctttgttgctcctacgcagtggcagaattattgtaaagcacgtggtaggacttcaaaggaagtaaaagaaaaaataaagaccctcgaaaatgctggcaagaaagaatctaaaattttatcgatccagtttgtaaaagaaaaattccatatagatacagacaacgataacttgtctgacgctatatgtatcggccattatgccgtaaatcattttgagatagaagggaagacgcttcatgtcaaagaaaaacaataagatttccattaacgcattggaaaaatactgcggacaattcaatacagagccgcaggatattgagatccattatggggaagatgaagtgtttacttttacagtaaagccacttttgaccatggatgagtcagtgaggtttattgaagaggtcgtgcgggagtgcatcatgccagatgacatgctgattgtgccaattgcccgcgattttatcacaaaaaagaacctgatgacatattacgcaaactttactatgccggagtcgcaaagcaaaacctatgacctggttatggcatcgactggaattatcaatgcaattttggacaatatcgacattgatcagtttactatgatccagcggtcaattgatgagcggattgcatttgaagagcagaagatgatcgcagagcagcaaagcaatgttcggaagattactgaggatgtttctgaatttgtttctaagatgtcttcattgtttgacggcattgatccagagcagatggatgggtttatgaccagcgtaagcaaaatggcacaaaatactgagatctctgctcaaagcttagcgagtgcgtttttggagagcagaaacagtaaagaagactaaaacacttggaggcgcttatgaagaaagcatttcttgaagatgaatttatggatgttgaagatctgatggagacaacactacccccccctacattacttgagtattataggagattaaaagatcgtgagattttgtggaatgacttaatcgacgatggcatgatcgacattcctatgtatattttgaaatggaataaggaggattctggattgccagttgaaaagcgaaagccaatcaaaatctatatcaattctgatggcggagctgcaaatgtgactttgtatacagcgaatgttatttcactctccaaaacaccagttattactatcggaatgggaagagcttacagcagcggtgggcttttgctcatggcaggccataagagatatatttttgactcaacctctattttgattcacgatggctcgactggagcggtaggtgatacgggcaaggtgttggacaacctggaatttacaaaagagttcgaggcaaaagtgcggcagtttattttgacgcacacaaatattccagaagacctaattgatcgcaactatcgcagagattggtttatgttcagcgatgaagcaatcaagtatggggttgcagataaaattgttacagatcttgacgaaattatttaggaggccacttcatggcgcgaaagaatactatttcatatccaattaagccacagccgccaactaccctggatgataacccattctatggtattcagtgcgacgaatatcaaaagcagtttcgtgatgcaatttggaacccagaaaagctgattgtgttttgtaatgcaaaagccggaactggaaaaacaacgattgccaccgcgactgcaaacttgctctgtgaatatgggctttatgatggaatcatctatatcgcttccccgacacaagagcaaaagcagggttatcttgcaggatctatcgaagagaagtcagagccatattttgagccattttatgaggctttacaaaagattggcgttaatctgaatacggtactttttgataacattcttaatgagaagaatgggacagcttatatcagatgcttaacgcacacatttttgcgtggggtcaactttgagaataaagtgatcataatcgatgaggctcagaattattattttgacgaactgatgaaagttttaactcgaatccacgataattgtaaggtaattgtgattgggcatgatggtcagattgacctatacaaaaatccagagcgcacgggctttgtacgatacatgaaatggtttgcagaagacgacagatgtgctgtgtgcgagctgaagaagaattatcgaggatggatcagcgaacacgcagataatttgaaatacttttaactgaaaggcggaatcccgccttttattattttgcgaggtgggattatgccaaaattcaaaagcacaaaagagcttgtggcgtatctacaaaaaactgtagacagagttcttacagaagatgtgttcccagttatacaacaagaggaagtacaggcggttgatgatgtcgtttacagtatgccgacatctggatactaccaaagaagatacgattatgagggtattggagatccagataacatcgtgataaagggtggagccgcaaagaatggcattatggccgttgtaaacgaaacagatccgaacccatatttgaatggtagaagtggggcaagagctactgtaaataaaagcttgccatatgttattgagtatggaattggtcaacctggagatccagggtatgattattgggctggaaaaccaagacggtttacagcaactacaattgatcgtctggatgcttctggggcgcatgtgattgctttgaaaaacgggttaagaaagcacggaataaaagtgcgataaatttcaaaaggaataagttaatttacttttaagtgaggtgattgtgcgtggatgaactgcaaattctgctgaaagcgatcattgatagcgatagcgtcacatcgcttgactctcagttgtccaatattgttaaatctctgagcgcatcgcacgaagtaaagctgaaagtagccgttgatgagacttccatcagaaccacgcagagccagctacaatcaatcgctaagcaggtttcttctgctggaaatagcgggagacaggtacaactcaaagtctttgacgctgcgcaattacaggcggacggtcagagatattttactggtgtaagagatattgtttctcgtgtccaaaaacaattcagtaagcttggcagtgtagatgttgtcaatgtgtttaaggacgcacagggcgatattcagagttttaccgcaagtgtgactaaggctgatggagttgtagaaagatttaattttaacctttctaaaattcgtcatggctcaaggacatacagcggctttgtgcaggaaaactctattttgtctgataaaaatgctggtacaaatcttcagaaaacacttgattatctgaaccgaattgataacaagattgcggatattaccagtaggactctctccaatacggcaaagccactgcttgccgatatggagcagtataatcagtatcaaacaaagctgacacaagtaaaaagtagaattgatgaactccgtaaggcgaatactacgttgtctgcggatcataaacgagaaatcaattctatggtggctgatttgcaaagatacgcacgggaacttcaaacatctgcgtatgcggcaactgatttgaatgcagccacatttacaaataaaaaggccgaacttcaagctgccttgcaaactgacatccagcgttggcaaaactctggtttgttcggcgctgatttcaaggcggctgtaaacgatgcgaagcgaatgcttgacgaggcgctcgatccaaccgatcttgatgcgtacagacaccagttgtcgttgctgaatcagcaatttaagcagatgaagcttcaaaatactgcgtctggtaaaatccttgacgcagataggttgacttcaaatattcagactgcgcagttgcgtattcagaatctgaagaatacttatagctcatttgtaaatgatccaaatctgttggcaaaatggcaacagctctttgacgaatcaaagatgatcagcagcagtaaagagctgacaaatcttaacgctaaaattcgtctgtttgagcaagagctgatcagcgccggtaaacacagcagatcgctttgggatgacctaaaggcaaatgccgcaaagatgggttcatggatggtgctgggcggcgtaatcgccggcgttatgcgcggtgtaaccggcctgtatgacgcagtggttcagcttgacagtgctatgacagagctgatgaaagtaacggatgaaaccgacgcttcatacgaagcatttttgtccgacgctgctgacaaggcggtacagattggtactacatatgccgattttgtagactctacagcatcatttgcacgtctcggatataatatggaagatgcctctcagctttctgaggttgccaatatctatgctgtggtaggcgatgaggtagatggcattgaaggtgctaccaactctatcatttctactatgaaagcgtttggtattgaggttgacgacactatgagtatcgttgataagttcaacgaggtgggcaaccgatttgccatttcatctggcggtattggcgaggctatgatgcggagtgcatctgctatggcagaggcaaataatactattgatgagtcaatcgcattgatcgtagccgccaacaatgttatccaagatccagatgtcgtcggtacaatgtggaagacggtttctatgcgtattcgtggtgcgaagacggagcttgaagaagccggccttgaaacggagtatatggctgaaacaaccgcttcgctgcgcaaaaagatccttggactgaccaatgttgacggcagcggcggatttgatatcatgctggacgaagagacgttcaagagcacctatgatatcatgcttgggatcagcgaagtttgggaagatatgagcgatatcgaccaggctgctttgctggagctattggctggtaagcggcaaggtaacgccctggctgcggccattaccaatatgggcgacgctgttaaggttatggacacctctctgaatgctgaggggtctgccgttagagagcatgagaaatggatggacagcattcaggccaagcagcaacagttccaggctcaatatgaggtgtttgcaaacactattttgagcagtgatttgatcaaaggtgtctttgacgctggtactggtttgcttgggtggcttacgacattggtagatacggttggcgcattacccgccgttttcgctactgtaatgccatttttggataagctcaatttgttccgaacaacagatcagaaaaactggggcggctctggaacaggcattgcgtttgcatggaacgcccaaaagcttgaacttgataacgatattaagcttttggatgaatataatagtaagattgcaaatctcggaacatctacgggagatctaactcaacggcaaattgtatggaatgatacaattggaaaaggcagtgataggctgcgcagtgccgtaaaggtttctgacgatgcggcggtgtcttctaaggcatatgcctcttcaatggagcaggcaagcataaagactacccttatgggtgttaagtctaaggccgctgcaattggtgttcaggtacttaatacagcgcttaatgcgctgatcggtcttggtattggtcttgctattaacgcaattatttctggtatcacttctcttgtcaacaaatcaaaagaggctcgtgaagcagctttggaagctggttctgccgccgtccagagttcaaatgaactatatgatcttgcctcatcatatattgagatgagctatgccgtggaagctggcactgcctcccaagaagatctgatgagtattcaggatgagcttgttgcttatcttgagacccaaggaatcgccgttcaaaatctttctggagattacaaggatctaagagattctattgttgaagcggcaagagagcaaatgcgtacaaatatctctcaaggagcaagagcggctgatattgcaaaagaagaagctgttaaggaacttgatggatatttcaactcacacagcttttattctgcaacgggtgaagctgctggagaagcaatggcctatcttgaatctcttgggtatgaggggatcgacaacactggttcaaatggtggcggaacaatctttcttccaagcgtttatagcacagacgggggattagaagatgtagaattttcagacctaatggcaaactatgagtatctaagagatactatgaatgctgtaagggatgagtttggcactgataatcctgtttttactgtgcttgcagatgcttacaacgaatatgagtctgcacttcaagaagcaatcgaacagattgataataccaatcaaatgattgctcaagacgctttgcttgctgcacaagctcttgaccagcccgctacagtagacgagtttaagcaattcagagagcagatgatccaaaacatccagaatacatctggatttgatgaggatggtacatatactgctgagcagctggcggataatgtacttgggtcggacgatagatattctggtctcctggcggaactacaagagcgcgaagcgtctgctgaggcagtcaacgataaaatgcgtgagattgctgaaaagcttgttcctaaaacatatgaagagcttactcctggaacatctgcacatttccacgcgatggagtcttggagcgcagaggtcgaaaatgtaaaagacaaacttgaagctctatccgacgaagattttgaaattgcctacaatgcagttatcaacgaaggtgcgacaacctgggaagatatcactgctgcaattgaagagtacaatagtgagcaggctgtagcggccagaaatgcagaggcattgcagagccgtatccgtggtatgtgggactctgaggacttctcagataccaaggaagagcttatcgctatgtctcaagcagtggacggtattactccacagaatattgaagaactcgcttctgaaagcagtgtgttggctggcattttggaagaggacggaatgaatgctcaattcctctccaagattcttcagaatatggcagagggcggagacggcgtttctcttgttacggctgaggctctaaagctcaatgatgcccttgatggtatggtcgataagtttgaccaggtaacagatgcaaagtcgcgctatgatgcggctatggctgtagaggaaaaggataccgatttccgttcttatgcagaggcatttgaagagctgaacgcccaatttgaggctggtactacaaactcaaatgctttctgggctgctgctgaattcctgtttggcagtgagcagcttaatacatggggatggagtgacggactggatgagatctacgatgctatgcagcgtaataagagcgtctttgaggatgcggacagcgctggtgctggatttatccagagactttacgatatggctcaggccggccagttggtcaatgatgagggcgaagacctaatcgagatcagcaaggatgcaactggtgcattcagttttgatgttgatcctgaaaatcttgacgagattgcagaaaagatgggtatcacggaagaggcggttatcgcctgtttcgaggctctatctatgtggggcgacattgacttttacgatctcactgaggtatcagaggttattgacgaaattggcctctctgctgaaactgctgctggcaaggctatcaatgtagaccgcttgacagagcagctgatgacccttggtaaaacagataaagagatttatgatgttttgtctgctttacaagggcttgatggcgtacagctatttagtgtatctggtgatattgactctgtaacaacaagtctacagaatcttggccttgctaccagtgatgattatacaatcacggttaattatgaagggcttggagatcttcttgccaacattggttataccaaggaagaagcagaagggcttattaccaaacttggcgaagcagacggcatttcactggcaaatgctgatggtcaagtgcagagtgtaagtgacgcgcttgattatatcgatacgattacatttaccaatgttacaacatcaatcaatggtgttgaaactgcaattgacgatgtaaatgactctactacgagcaacgcagagtcagaaattgatgacattggatcagccgcacaagatgctgcaacaaaagtttatagcattggtacggctattgatagtgtaaatggtagaactgccactgtatattataatgtacagcgtaaaggtggtcttattgacagtattggtaatctgcttggctttgcaaaaggcacttctaatgcgccggctggcaatgctttgcttggagacgagtattcacccaacggttctccaaagccagagcttgttgtatcgaaggatggagcatatctcgctggaacaaacgggccggaaattgcctatttgaaccagggagaccaagtttatactgcggatgaaaccaaacggattttaagtcgttctggaaagcgtatcactggtacaattccagcatatgcgtctggaagaatcacaacaagcggtttgcgtgtcgaggttgacaagaacggctctacgggcactccgtatacttctcccacgacaactgccacggtagatgttaaggctgaggttgataacgaagagcttgctgaagagatggaggatgccataaaagaaatccaggatgagcttgacgaaatcctgggtaattatgagcacgacatctttacgcttgaaagaaatgatggaactccagaagaaattattgctatctataggaagatgcaagacactgttcaccagtatgcggaaaaataccgtgcaatgggactggatgagaataacgattacattcaggagcttggagaacagtggtgggagtaccaggatgagattgacgatatcctacatggtatttatacagatgctgttgaggcgcacgaaaataccattgaacttttgcagcaccagtatgatggcctaagcgatagcaaaaactatcgtgatatggctaccaatctggaacggcagcgtcaagagcaactgagaatccaggagcttgcccatgaggaagcacaacggttaagagcgcttggtgtggacgagaacgatgaggcaattcaggagtgtattgacgcatggtgggatgctgaagacgatatcaaggaaatcaatgaatctatcgttgataatgtacttgaaccgtttgatgagtttatcgaatatgcggatgactttgacctttgggatcggtttgatttcacaaaagtagattacctaaggcaaaagatcgccgcactgaatcggttgcttgaacagggcgttctaactctaagggagtacacggagcttttgcgcgaaactcaactcgatatttataatgagcagaaagacgctattacagaaatcattgaaaagacaatggagctggtgcgtcaggaggccgaggataaaattgacgctctggaagaacagattgatgactaccagaaaatcattgatttgaagaaggagtctcttgaagtcgccagggatgaagaggattacgagcgtgaggttgccgagcgggttgctgagattgccaaggtacaggagaaaatcaatcagctaagccgtgatgatagccgcgaggctaacgcagaacggcagcagttggaacaggagcttgccgagcttcaaaacgatcttgctgattaccaggcagactatgcgtatgatgcgcaggtcgatgccttggacaaagaagcggacaagtttgaagaaaccaaggataatgagattgctaaggtcgaggcaagcgttgacacagaggaagaggtttacagagccgctattgaccgtatcaatgcggactgggatcagctataccaggatctgattgcttggaacagacagtatggtgacatgattgatggggaggattcaattacatctgcttggcagacagcaatgcaggccgcacagcagtatggagatattgtgtctgctctcaatggtatcaataatgatatcgccaatgagcagcaaggtatcttggatcaacagcgggaagacgctgaaatcagtgcaattatgtctgagatgtatgcaaatggtcaggcgtgggggtctgcctccgacgaagagaaacagcgcctcgctgatgaaaacctacggcttggcagattgcttgccccgtatggtattaacgcagtccgtggcgatgacggtgtatggtatgtagatcgcgttggtggagagcaactgttccaaaaatatagacagtatatttatcacgacggaggaattgttggagacgattcgctgaagagcaacgaggtattcgctaagttgcagaagggcgaggctgtatttaccggccagcagtatgaaaatctgcttggacaaatcggtagtgcgattactggcgtggtagactctgttgtgcgtagtcttgctaccgcaagagacacaaccagcgatgcaattcagtctgtcattaacaacgagagcaccgacaattccatgggggcaattagcattgaaaaccattttgaggttaagaatgcggacacgcaatctgctaaggaattggcggactactattctgatcgtacaatcgataagctcatgaccgctgcaaagcgtaagggcatgaagaatagtttaggaagtcatatgctccgataagaacatgcggccaccaattacggtggccgctcattttataaaaaaggaggctttgaacatggttgtagattttgcaaaggtcaatgtgaaagagcagcctctacttattttgcagaacatggatgatacgccaatcggtgtattgggctacgcttttaatgtagaagcggatctttgctataacgagatctcaacgctatcgttcgatcttcctgggtatgtagacggcaaagcaactccgaactacgaaaaagtagttggaatgagaatcattgatctaaaggactatggaagatttcttctggtagatcctaaaacaaatagcgacggtgtgcgagaggtaaaaacctgcaccgcttattctctggagtatgagtttacatttaagaagcttgtgcttacagccggaacatacaatttgtggaatccaattgcaccgaaaggtacgattattggcatgattttagatcttatgccgtcttggaagattggacaggtagatgccagcctgattgacaagtatcgtacctttgatgatagcggtgatcaaaatatctataattttatgaagtcggatttgcaggagtcatacggctgtgtatttgactttgacacatacaaccggcttatttatgtaagagatatcgaaaacgagccggagacaacaccagtattattttctctcagcaacctaatcaaagaggtatcagttgaagaggacacggaaagcattgtaacacaactaagtgtttacggtgcggataatgttgatatccgaagtgtgaaccccatgggaacaacgagcctgattaaccttgactactttatgacccatgactatttctcgcaggatattatcgacaaatacaacaactggaaagaaacatttcaatcttaccagcgaacatatttcaattacaccgtggaagaggctttgaagacagcccagctccttacagagcaggcggcaattacaacgctggagggagaattaaaaagtcttgagaatatccaggccactacgattcaggcgattgctcaaggattgaagagccaaagcgatctgaacaaagtaaaccaggatatctctgttaaaaagggagaaatctctgcaaaacagagttctcttgctgatattcaggccgaagtggacgagcttgatgaaaagatgcaggctatcaatgagataacaaaactgagtgctttttttacagaaaatgagtacaaagtaattgaccgttatcttaaagaagattccatttcagaggattcctttgtggcaattgaggtagattcatttgacagtgctggtgagagcatccctgcgtctggctcgattttcaatatcacagacgcaacagttactaaagtcgtaaatgaaaccggcaaagatatttattctattgttggtggtcatatcggatgttcaacatcagggtttgtcttggacgctgaaatcatccgggcatctcttgattttgatgacgaccacgatttgttgtttaccgcaagactttctgccggctctttgaacggagaatcgttcccaagcggctgcgtgtcggttgccggtactggaagtacggtcacatccaatgttgtgccggattccagtgtgggcggagcaattgaagagggtagctctgtttcctttaagattggcactgcggatttgtactttaccagaagcacaacggagtacgaaaaaagagcagtagagtgggacttgcttgactatggcatggagttgatggagcgggtgtcttatccatcctatacatgcacattggacttggcaaatttcctcgctatgtcggagttcgagccatttaagaagagcttgaaacttggtagccggctatactggcaaagatcaaatggcgaagttatgcgcccatatcttgtgtccgtaaggattccgtttgaagatttgactggatttgaagttgagctttccagcaaatattatgcaaacggagacgggtttaattttacagatctgattgaggaaagcaatacggcagggaagacgcttgacagcgggaaatggacatacagccaatttgtcaatagcggtgccgaaaccagccttagtaagttcaccaaagaagcgcttgatattgcaaagaataatatcttgtcatcaaccggtcaggacatctcttggagcgaatctggattgcggctaagaaagcggaaagaagattcgccaacggagtatgacccatatgaaatctggatgaacaacgggcaaatcatgttcacaacagataattgggaaaccgcaaatttggcgattggtcagataaaaaccgaagatggcgggattatgagcggtgttatcgcagatagcctgattggtaagcttttggccggcagcagtatgattatcgagagtgcaaagaaagatggagggcagtctgttttccgtgtagacgggaatggcgcttctttgcataacgcaatttttgatatctacaatggcaaccaagttcagatcacaatgaacccgtactcaggatttgcaatcgggaaatacccattatattccgacgacgaatatacaatcaatgaggacaatgcaaacttctgggttgatatcaatggtaatgtccatattaaaggcactctggagggctgtgatggcacattcagcggggagcttgtagccgcaagcggaagattcaaaggagttgtgcaggcttctgattatcaggatttaagtggaagaagtatgctgacatcaagttataaattctctccgacctatctggaattgcgtggtttgactattaacaatggaagcaagaatactcttgttattgatagtgctggcaatattacgatggacggaaatattacgcttggatctggatcaagaatcaattggaacactgttacacaacttggtacaaacccgcagatttcaaatcttgaaagcgatatggacacacgacttaatagaattaacacgcaacttgattatgtatatgaggatatcgactggcttagtgaaaatatgtggacggagaaagaaatccgtaatatttcttctacggtcattaccgacgagttggtttcctcaccaatgattaagggtgcttatatccaaggtggtacgattcaaggttgtgacttcttgttcggcgattatggtgtaatctatgacggatacggtagcgacggagtgaacagaaccgatctggtttatatcgagtctatcgagggtattgccattgttgccgacaagggtatggcgcttcgagctggcgatggaatttggattccagatgatatccacattatggttgatggagactacattgatttgggatcggtgatttcagatctacttgcaaaataatacggaggaagtatgagagatattatcaaaaaaatcaatacggctacgatggtgttgagcaatatcgatgtacgagggaaaaataatcttcttaatcttggcggtgcaatcgatctattggagggcgttgcggctcaactaacgaagattaacattgaaaatacgctcaacaaagatgatgagcaggttgcaccaactgaacaagctgaataaagaaataaccctcaggaggtggtgttatggctttttggggtgactactttgtatatgatggaatcccatgtacggagtttggcctaagactatatgaggttaatggtgtaacacctggagagggaaaattctctgttgcatcggatgttttagaggacagggttgcaaacagatatcggcctttgttttatggtgttacacaaaatgaaccgctgtcatttaagatggtatttggcgctgataaagagttagccaattcaggcggcttttttgatgcctgggatagagaggcgatcagttcttggctatccccgctggatgggtacaagtggctggagattgagcaggatgatatggagcaggttcgataccgctgtatcattgaagagttggagatggttgaaatagggaatctcccaatcgcgttttcatgcacggttcggtgcgattccccatttgcctatcaatatcctattacctattcgtatacatgccaggggaatacaagtattttgcttagaaaccttggaagttatcgcggtgggtattatccaaagctgaaaattaccacaaatggaactgacagtatcgaaattatcaaccattcagataacgatagaacttttgcttttactggtcttccacaatcgtattttttggagattgaaattgacaacgagaatagggttatcacgaacaacatggatattaacctctatccatgttttaattttgagtttttcaaattggtgtgtggagataactccttggaagtcgttggggattgcaaattagatattacatgcgagttcccagttaatgtaggagggtaagggagatcatgattagtaaggtttataatttgcctgagatctcgtttgtaggtggagagacacacgatcttcgctttcacctatttactgatacgggcagggtatttaacgcttctggagcaaaggcaactttttcaatcgtgtactcggttaatagaactggaacgccagtattgtcaaaatctatgacggtgcttgcagacgacgacgggattgagagcgtacttgcggttacgctgcttccaaaagagaccgtaaatttgtatgggaaatatatttaccagattaccattcaggatatgtctggtgaaacagatatcccaagccaggggatcttagggattaccaacaatatcgacaaggcggtaattcgttaagtttctcaaaaggaataagttaatcaaacttataaggaggaaataaaatgaacactacatactttttgaatcaagtgatggggaatttgttcaagacaaaggaaactcctgctttgccaactgagtattacattggcctaagttctacacaaccagcagtgggcggaaccggtgtaacggaacctctttctaactctggctatcatcgtgtaaaacttgagaacctgagtgagccggacgacggcgtgattaccaacgagcaggcgatttcgtttgacgaatccacttcaaactgggggacaatgacacactttgttatttacgaccagttggagggcggtaatttgctcatgtacgataacctgtcaacagctcgtaatgttgaggctgctaccatcgtcacgattaaagcgaatagcttgactctaactctaagcaaccccagcgcctaagtaaatagttaggtggtggagaaatggcgcaaacatataacatttatctccgaaaacgactaaccgaatttgacctgatcattcgcaatttgccttatcgtgatggacttattatctataacagaatgtaccttgatgccatggtgaattatctgacattgcagaaatacatcattggcgacagcgatgtgcagctatcgtctgaaattgatgacttgctggagcgtgtttacaatatcttctccagtgggatggagcttggtgcagagcttgaagtatttgcggctaagccaactggcggatcgaccagtgctgtgctgagcacgaacgagacagaggtgcatgaagagacattcaacacatttcaaaatgttactcagcttttgacaagtgcgttgaaatacgatattgcgaaatctcttggatctggtgcaacagaaatggagctttcgtctgctcccgcctccactttgaaagaggcgttggaaaattttgaggatgatattttgttggacgcagatgtatccactgctgcggttgtaaacgctgaaggggattcggaagttgttctggacacaagtaatccaaatcttttctaccttttgtcagtggaaggagaggcgatgatgaatcttctcttctccgctgattttgaaatgtggtacacgcttggaactggcaatagttccatgtatttaagcgtagagaataatggcgtggagtctaagaagttcatgacgtatgaaagcttcctcaatcttattttggaggtagggaatatcctacagtgttttattttcccggaagagagtgaagcgcagttgcattctgaacttggtgtcgggatgatgagatatcgcttgctttctgatatggataattcagcactgaacgaacatgacgaacttacattggatgaattggattatgtaattttggcatgatgattttgaaaggggttttaatatgtcgaaaggaacgcttggtagttttaatggaactactaccgccaatgtaaacatgcttgatatttttaagcaaaatgaactggcggcacatgaaaacagcacacttgcgtttacggatctcatggtaatcaagaagattggtattaagtgcgatcctggaacggaggtagttattaacgggagtgaaattccgattgtaacaggtgtttttgagcttggctttgatcaggtcgatattacaagcctggtgttcaaagaagctaaggatgtaaacatctattacatgtactaaagggggtgttagagatggctgatttgccattcttcggagactcttctttcggtggtggaggcggaactataactggcaatccagtagttgatgctaagcttgcagaaaatggcgacatgatccttacgctaagcgatggtacgcagaaaaacattggtaatgtcgtaggtgaggatggcgctgtttatgtcccacatatctcagatcagaaagtattgtcttttacgattgaggatgaaccgggcgaagtcccagatccagtagacctaaatccgcacgatgaatggtctggaatcgacgatagcgaaattgtctccgactatgtgtgggagaaaatgtaacgctatataaactcttagagagtgtttatataagaaattctgctgtaaaggagggaaatcgaattggctaatgtaatttttaaggtcggtacaaaatcgctttacaatgcgttggagcagaaagataccaatactctgtactggttgaccgacaccaaggaaatctataagggcgataccctgttcggcactggtagtgcagcaacacaaaccgctgctggcctgttgtccgccgaggacaaagtaaagctggacgagcttgtcgctggaaccatcgccggtcttactccggtagacgcgacaatcctaatcgcggatgacggaagtggcggtaaaaccattggtgtccaagtttccgaagaggcgggaaacatcatcgagattaaggatgatggtttgtttgcgctggcaaacaacgactcttacaccattgaaaagcttagtgccgcaacagaggggtactccgctacatatcgtctgaagaagtctactgcttctggcgatagctatgttggagacgcaatcaacatcccgaaggatctcgtggtgcagagcggtagtgtaaaggtggtcacagaggctgacaacccatattctggcgctgcaatcggagacacctatattgagcttgtcctaagcgatcctgacgcttcccacatctatatcccaacaaaggatctgattgataccagcgactttgttgtggaagagatcgtgaacgatgatggcggtaaggcgatcatcatcaacgagcctacaggcggcggcgcaaaataccaccaccaggacggcactgagtcgtttgtgggcgtgaacaatggcggcgagaacggcatggttgcgcagatctacgccgacaaaaatgtagacggcaactggatcggctcccgtatcaatgtttatcgcaagggtatcttctatcataatgcggaggataaagcatccgatggttatgttgcggacgatcccaaccacgagattgcaacaaagggcgatgtaaccgctgttgcaaatctttttacatggcaagaaatgtaagaaatagcccagcggaatgaccgctgggactttattttataaggaggaatataaattatggctactgttgcttttaagaaaggtcttttggctaatctacctgtaacttatgctgagggtactttctatgtaaccacagatgagcgggctatttatcttgatgtaagcgattctgcccgtattcgcattggcgatttccaggaggttgccaatgttgctgctttgtcttctatccagaagccaagcactaccgctctgtactatgctactgctgagaatatcttggctaagtatgatggctctgagtgggtgcaaattaaccctgacactggcgctacttctattgaggtaattggcgatggtaacgccgtgactgttgccgcatacgatgccggttcccgtaagatcactctgactaagggtgccacttatactaccgcttctgatgtttccagcgcaatttccactgctattggtgatctgggtgactctgacgagggtactccatatgccaatgtaaaagcgtatgttgacgagaagatttccgatgtagtcgcaggctctatcgagggtctgggcgatctggcttctaaggatgaggtagctgaggccgacctggaggctactctggcttctaagatcaatggtaaggcagactctactcaggtagctaccgacattgatgctgctaagactgctgtgattggcaccgcagaggacgcttccactgccgatactatcaagggcgctaagaagtatgccgatgagaaagcttctgctgctcagagcgccgctgagtctcacgctgacgatgctattgccgctttggatgtttccgattctgcggttgcaacccagttcgtaactgccgtatctgagactgatggtaaaattgccgtcagtcgtcgggctttggaagccgatgatattcctgagattgcccagtctaaggtaacaggtttgactactgcgcttgctggcaagcagaataccgttgtgttcaataccgcctatgatgctgaggacaacaaggctgctaccatgacggatgtgcagaatgctgtggcggatttgtctggtgctatgcactacgagggtaactccaccaccgatcctgctgagggcgagcctactgttgccggacacgagggcgcatgggctaagggcgatgttgtaacatacaacgctaaggagtatgtgtacgacggttctgcatggcgtgagcttggcgatgagacttcttatgctgtgaaaggcagcatcaaggacgctgatattgccgcagatgcagctattgctcagtctaaggttgcgggcttgaccgatgccctggctgctaaggctactcccgccgacatcaccaccgccatcaatggtctggatgtacctgacgaggccgtggctggtcaggtcgtaagtgccgttgtggagactgacggtaagattgcggtatcccgtcgtgctttggtggccgacgatatcccaactctggagattgcaaaggtaaacggtttgcaggctgctttggacggtaaggctgtagggtctgatatcaccaatgccattgccgcactggatgttgaggacaccgctgttgacggcaaggttgtttctgctgtgtctgagactgacggtaagatcgctgtgtcccgccgcgctttggttgctgctgatattcctgagctggctcagtccaagatcaccggtttgaccactgctttggagggcaagcaggataatttggtgttcaacaccgagtacaatgctgccagcaacaaggctgctactatgagcgatgtgacaaacgctttgacttggggcagcttctaatctaaattagcaagttcatgatttcccatgttgggggcggggtaacacccgccctcttttcatttctctgtagaacggaggtaaggaaaaagaatggctctttttaagattttgaaaggcgatagttccagaatctctacagatgtgaccccattccacgatgggtatgcctattttaccccggacgatggcggtttctatattgattctgaggataacggagtccagaagagacatcgcattaaccaaccgggcggaggcagtaatgatgtatctgcaaccctgcttgcatccgcatgggtgtccggccagcaaacggtcgccattgaggggatcaccgctgataccgatggttttgccggcgttacccaaacaatttccgacgctgaattagaagcggcaaagaaagcggagctttatgtgtgtggtcagagcgatgggacattaacgattgcggcatttggtgatgtaccaacctgtgatattccaatcgtagttatcttgttgcattaaaagggggtgtagccgatgagtgagacccctaattatgggctttatttggaagatgatgcttccacgaagtttcaggcgtggcgtgaaaagataaatggttctgataactccaacatggtcaagatcgatacagctcttgggactatggcgaagaaaagcggaaacttgaccgcaacacttctttcttctgcatggagcggtattgactcaccattcacgcaaaccatttccctggaagggcttggtagtgagcaaaatggatttatctctgtcgcgcagaatgcaacgattgaacaacgggacgcagctcgaatggcgaagtttgctgtgatcgggcaaagcgaaggggagcttacgattgcggcggatggcgagatgcccgatttggacatccccgttgtagtgattcttttaggataaaggagggacatctaaatgcctattgtatctaactttccatcaggtggcggaactggcggcggagggctacagctcgccgctgtttctaatattaccaccaaagtatcgcatgggaaggtgtatgtaaagtggactgaccctgaagacctggttgtagcagagtctacactggctgaatgggctggtacgctgcttgtccgcaaagccggctctatgccagttagcagacgagacggcacggttgtcgtagacagcaaggtgcgcaaccagtatcagaatcagtatttctgcgatagcggactatcagatggtacggtttactactataaattcttcccatatacaacaaccaatacttataccgaaaatgaagattgcgaatttaccgcaactcctaacgccccggttttgggcaatgtttccggtatgagcgctacacctgccggtaacggcaagcttgcggtgaagtggacagacccagcggctaccatcgtagaagatgggcttacccttgcgacatgggagaagacaaccgttgtggttaaggctgggggatatgcaaccagcccagatgatgaagatgcggcatacacactcgctgttaccacgagaaaccaatactcaagcaatcctttggttgtcactgggcttacaaatgggacaacatactatgtgtcgttcttcccagagactaccgatggcgcggtaaatgtaaacgcaagtaatagaataagtggagaagctaaccgcatggtgattgccacggttccatctcagagtggatctcttacttataacggcagcgcacaaactccgtcttggagtaactatgatacaaccaagatgactttgagcgttacaggccagacaaacgccggtacttacagcgcatcgtttactccaaaggacgattatatgtggagcgacgagactactgcggcaaagcaggtaaactggacaatcaataaggccgctggcagtctgagtgtaaaccccacaacggttacgctggatatggagcatccgacagctcaaatcaccgtaacacgggcaggcacaggcgcaattacggcacaatcaaacaacactggaatcgtcacaacaagcgtcagcggtaatgtgattactgttcacaatgtaaatcagacgagtggtgacactacgattacagttaaggttgccgcagacaacaactataatgcgcctgcggacaagacggtgacggtcaatgctaaattcgtcagcaatacactgaacgagaacgattggtctgttattaagacagtttctgatagcgggcagggcgataactattgggatatcggcgataccaaaaccatcgtaatcaatggtaaggttggtaattttacattcaacaatctttccattgatgcgtttattattgggtttaatcacaacagttctcgtgagggaagcaaccgaatccacttccaaattggaaaaattggcgggaagatggtcgggcttgtagatagtcaatataacaactatcagagtagcaatggctattttaatatgaatccaaacaacagtaatagtggcggttggaataatagctatatgcgcaagaccttgttaggtaacactaactcgccgacaagcccgcttgccaacagcctgatggcggcactaccttccgatttgcgagctgtcatgaagtccgttactaagtttacggacaataccgcaaacggaggcgggaaccagagttcttatgttactgccactacggattatctatggctgcttgcggaatttgaggtgcaaggtagccgtacatatgcaaactcttacgagaaaaattaccagcagagatatgagtattactctaaaggtaacagtaaggttgcgtatagacacagcgctaccggtagcacggcttggtggtggctccgctccgcctattacaacaatagcaacggtttctgcagtgtgtggactgacggctcggccaactttaactatgcctacgtttcaggggcgttgctgcccggctttgctgtctaatccaccgcagtgtatccaggatcaatcccgccaacgacagttggcgggttcccccgataggacggcaagggaggacgaagacaataaacggcggcgcgaagcgccgccgcgaatttttctgcattttcctaccatcccaaaagtgctatcacttgacaggttagtgagcgcatacaaaagctaagaatggtcataaaataatagcatgtcattgggatggaggttcttatatgccaacaaacaaacgagtgtttacgctgcgtctctcagatgaaattttcgataggatcgggacgcttgcggctcaggaacaccgctctatgacaaattatatcgagtatgttctgatcaaacatttagaagaactcgataaagaaaaaggagcgggtcatatcgaaaagaaaactgattgatgcgtaaaccagcacgataaaagaggtgaaagattgtctgtactaaaagcaaagcgaaccgtaagcaaggctgagtttgtaaataccgcaaaccagatctatgtggaaacgctgaattttctaacgaggatgtcggccaggtattcccggcttctggccgagcctgtcgcaaagctggccggcgaggttgtagatcactgtgaaaaggccaacagtatttttccgtcagatgaacagagaaaggatttgcgaaaggcgcatctgttagaggcaagagcatctctgaaagcgctggatgtgagacttacccattgctatcttataatgatgcaaaacccggaagggtgcttcacgacgagcagtgggagacaggttggctcgaaagaagctgtagaaaagcttgaccgcatggctgcaagccttggtgaaatgattgatcatgaggacgaattgatcaagggcaatatcaagtcagttggtcaggcaaaacaaaaaggataactaaattattgggtgcatgtctgtaagtgagactgttttttgtccgctctgctgtgggcttggtggtggctccgctccgccaattacaacaataacaacaatttctgcaatgtgtggactgacggctcggccaacaataacaatgccaacaattcaggggcgttgctgcccggattttgcgatgcgaggtcacatggagtaaccgtttcggtgaaagacgaccttcgcaaaaggagatatgcttcccttggtgaaagcccataaaactgcccatcgacgacttttacacggacgctgcttgcatggcgggggattgcgctgacctcgtttcatgtgtaaggtcaatgtagtttggacgcgcacctacaacttaactatgcggagggcgaataatttttatgacaagcgaagagcgccgggaggcgcgatatcgtcgcaggaaacaaaagcgactaataaaacggtggatgagaagcagtgcggtaggctctctcgaagatgtttttaactaccgcgatatgttctactggggtaagaaatgttgtaacggtgtgcgatggaaacaaagcacacagaactttgaactccatttattttctggtactgccaagagaagacggctcgtactggatggaaagtggaagccgagaaagtgcgcccactttattttgcacgagcgcggcaaggtcaggccaatcgacgcgccacacattgaagacaggcaaatccataagatagaaaccaacaaggttttatccccactctatacgccgagcatgatttacgacaacggcgcaagccagaaaaacaaaggattgcactggcacttcaagcgtgtgaagaagcacctatcttggcactacagaagatacggcagggaaggagctgtattccttctcgatctaaaagggttcttcccaaacgcaaatcacgaacttatttatcagcgtcatagaaagtacattatgaatgaggatgtacgggcgctggcggatctcattgtggcgaattctccttgtaccagcccaggtagaggaatgccgcttggagtagaaccaagccaacaggagatggtttctcttccaagcgcaatcgacaactttattaagtgtcagctcggaattcactgcgccggccattatatggacgactactacattatcatgccggacattgaagagctgaagaaagttgccagactcattgtgcgccggtttgagtctgtgggaatccccgtgaataagagaaagtgtaaaatcatccctctcacaaaaccattcaagttttgtaaggcaagattcactctgactgagacaggaaagattaaagtgaatggatgcagggatggagtgaagcgggcgagaagaaaactcaaactcttccatcgtcaattccttgagggaaagaaaactctggaggaagttgatcagtacatgaactctcaaaccgcatactacagaacatttaatgatcacggaaggttactgcgtttgagacggatggactacgcaatctttaataagtataggcaggaacggcagttaaaattggctggttgacccgcctacactatatctaccgccgatggcggtaggaaattaacctaatttcatatcaaatttagaaacactcagagtttttctctgggtgttttctttttgtttggaggtcttatagtgagttatcaaaactatattgcaagcagacgcgcaaagtttgacggaatcaatggatatgtcaacatcccatatggcacaaaattacatggggatgatcgttttatctattattgtgaaaagccgctgtgtacattatcaagcaagaatgcacatgaacacttttctcaagacgatgatggaaacggcttgctgcgcgggaaccttgtgagatcgatcaaaaatactcttgagcgtagagatgcttcctatcagagcaggtgggataaggtctgggaggatcaactgtgccagaagtataaaagaaaagagcatgaagacttctggctttggaaccatgatttctacaacgcgggaatcgacgatttgaaatacatcgctaagcttgttggcgcaaaggagggacgctaatgtatcgtattattaaggtttcagacggaacagaaattggcgtaacggattctgctgaatttatccgttacggaaacagcgggtgttttgttcccgctgatgaggatcatgccattggggtggcttatgatggagtcgcctacaatcttatcgggcatgacgatatcgaggacgcagatacagttgttgtatcaaaatttgacggcggcggtgtggtagctgaacagcagcaccttgttgacgaactaattcttacagtattggggggataaccgtgaaagaaaagctaaagtctatgtacgaagccggcgtgattgacaccactggcctgctcaaagcggtcgatcatggttggattgcaatttccgatgttatagaaattgtaggcgaggaagatgctctgtccgtggttatggccgcaaagcttggagagatttctaagacatgcaatgcggtaattgtgaatggcgtagatattacgcttggagatgaggaagtacacttcaacctaagtattgaagatcagtcaaacatcaataacttgttccgtgttgttgagcttggcggaacagagttcccataccaatctgacggcggtgtgtgccgggtttattctgcaagcgagatcgttcaaatttatgtcgccgctcaaacactcattaccactcaaaccacatatcataatgaactaaagcagtatgttcagagccttgaaagcgcagaagctatttctgccgttcaatacggaatgaatttgcctgagccttatctcactgagatgaatgaaaagcttacggtggcacagcagcaaatgcaggccattgtagagaagatggctcaatacgcatctgaggaagcgtaatcaatatgattgtacgccatagcctaaaaactgcttttctttttgtagttggtggtttgatctatatactgattgagcttttatggcgtggtcacacacatatctcgatgttcgtccttggcggcatttgctttgtcgccatagggcttattaacgagatatttccttgggattttggatttctatggcagtccatgataggcgcagtggtcgttacagtccttgaatttattacaggtcttgtcgtgaatgtatggttaggtctgaatgtgtgggattactctgacatgccgctcaatatccttgggcaaatatgtctgccattttctattgcgtggattgcactgtctgccatagcaatcgttcttgacgattatttaagatactggctattcaaagaggaaaagccgcgctataaactgatctgaatctgtctgtaaaatagtaagtcttttgtcttagtgggagccgatttatgtcgtgctcccgctttttataaggaggtctctttatgggtgataaatacagtaagcctattttgaatatgcgctactacaacaaagaaatcgacgatgatctgccttatattggtcagctcaactacgatgaggaaaccgggctgatctacgatgaagagggagatgttgtagacgaagataccattgcaaagttttgcgagggggatggaagaggcgacgacgaggacgattaaccaggcgtttatcaggaggtaattttagatggcaaatgataaaacgatatgggagttcttgaagtcgaaaggtttgaatgattacggagcagcaggattgatgggcaatctgtatgcggagtcaggcttgcttccaacaaatcttcagaatacatataacaacaaatttggtatgacagatgacgagtataccgccgcagttgataacggcagttatggcaattttgtccacgacagtgccggatatggtttggcacaatggacattttggagtcgtaaagagggacttcttaattatgcaaaatcaactggcaagtccattggagatcttaccatgcagttggaatacttgcttcaggaactcactactggctataagagtgtcttatctacattgaagtctgcgacatctgtgttgcaggcttctaatgctgttttgcttcaatttgaacgccctgcggatcagagcacagccgtacaaacgaagcgggcttcttatggtcagaattattataaccaatttgcgggcgtagcccaggaaggagggagtgtcgggatgagcaatagtccacttgtagagtacacaagaatttcacccaaccagtcaggaaaaagaaaatacgcgattgatagaatttcaattcactgcgtagtaggccaatgtagcattgaaagcttgggtgcgatttttgcaccgtcttctaaaggcgcatcttctaactatggagttggatatgatggaagaattggcatgtatgtagaagagaaagaccgttcttggtgtacttcatcagcggcaaacgataacagagcagtgactattgaggtggcaagtgatacttcagacccatatgccgttacagaagctgcctatgctggtttgctgaatctggtaacagacatttgtaaacggaacggaaagaacacgctgatttggtttggcgataaaaacaccgctttgaattacacaccaaagtcgaatgagatggtgctgaccgtccaccgctggtttgcaaacaaagcctgccctggcaactacctatataataagcatcctcaaatcgtagaagaggtgaacagacggcttgctggcggcagcgtagatactggtacggctgtcagctatcaggtaagagtaacggcagatgctggactgaattgcagaacgtctcctatcaacggctcggttattacagcctatgaaaagggaactgttctgaatatctcaaaagaacagtctggctggggatatacaggaaccggctgggtgtctcttgcgtacacagagaaaattgcgaccacaactacagaaacggaggatgatgaagatatgactttagacacttttaagaagttgatgaatgagtatcgtgcagagctgcgcgacaacgactgcggagattggagcaaggccgctcgtgactgggcgacatctactggtttgtttgccggcagcgggaatctgccagatggcacccccaattatatgtgggcagacatgctgacccgtgagcaggcggcacaactgttttataacttcgctcagaaaaacggaatggcctaagtacaaggtggtgttagtatggcggtttcaagcaccagggggagaagggttagaagaaaagaaaagaaaggtttgttcgcccatttgaagaaccttgggtttacaaatcgccttgctctctatattatgctattcttggccgctggtcttgccggcggtttttatcttgcagtaaaaagcatttcaacaggatatacaggcgcactgatgtgctggactgtagtgtttactcccatcggcactgcttgcagtatcgttttgtcccgcattgtagataaaagtcgggcggaaaatacgagcgccgatggagaggggatcaagtatgcggcggcgaaagcaaatcggtttgtcgcaagcgcaaatacatctgatttaggaagcgtagatagtccttccatttaacatgggcaacagtattctgccggatgctgctgctctttatttttttataaggaggaagaggtatggaaatggattgggtaggattggtagtctctattctgtctggtcttgccgctgcaattccactggttgttcaactggtgaattatgtgcaaaaggcggtaaaagaaaagaactggaataagatgctcgaaatggtgatggatcttatggagactgccgaaggtatgtttgaaagcggcgctgacagaaaagaatgggttatcgccatggttaaaggctcagcagataccatcaactatgatatcgacattgaggctatcagcgcattgattgacagcctatgcgatatgagcaaggtcgtgaacaactctgtaactcccgaagagacacccgacgaataagggttgggtgatacagaatgcttgattatattgagtatttggatattccagttagagtagcgattgtacttatttcagcatttcttattatgcagttggtaggggagatcctggagtttaaggggaaggtcgttcctgagtttatcaaggttcgcaaggtatttgctcgccggaagaaagagcgcatgttgatgcagaaaatggaaaaaacgcttgaccaggtgcaggtcactatggatgagctgaataaacactacagcaccgacaacattaaaatgcgtgacgagtggatcaaaactgtaaactctaaacttgatcagtacgatgcaagtatggcagaactggatcgaaagcttgataaaaataatagcgacacgctttctatcttaattgacagtaagcgtaactctattatcagttttgcctcacttgtaatcgacgagtctaagcctgtgacaaaagagcaattcaacaggatcttcaaactgtacgaagagtatgagtcaattattaaggcaaacggtatgacgaatggcgaggttgatatcgcaattcggattatcagagaagcctatgaaagccacttgaggaaccagtctttcattgaagatatccgtggctacaatctgtaatgtatacgggggagcataaaaactccccctattttttacgggtagcatttgacagaggcattttcgtgatatataattcaaaaaggcatggccgcaatagggcggggaattagtcttttcaggtgttctatcttaccccagattttaccccatttgagtgacgcaagacgcaacaagacgaactcaaaatgcgataaagattactgatttttcgtctgaaaggcgggaatatcacatgatgaacaatgatggagtctatattagacagttccccaccatgaagcccctggacaagcctgagtccgccaagcgcgccgcggctggaaccaactgcgctgtccccgccgccgagcagggcccggtggacttctccaaggtggagattgagcccctgttccaggagttcgtggacttcgagacctttgccaagtccgacttccgggccgtgaaggtcaaggagtgcaccgccgtgcccaagagcaagaagctgctgaagttcgttctggatgacggcaccggcgaggaccgtgtgatcctgagcggcatccacgacacctatgagccggaggagctggtgggcaagaccctcatcgccattaccaacctgccgccccgcaagatgatgggcattgactcctgcggcatgatcatctccgcggtacaccacgaggagggcgtggagaagctccactgcctgatggtggacgaccacattccggcgggcgccaagctgtattgagccggtctgtcctgggaagcgggagcaagtgcaagggggtatgaggagagccatggagaagcgcctgggaagtgaatatctgcgtgctgaccgggcgtttcatacccccgctgctcccatccccggctggaattcgccggactgaatgagcatgccgaagggaatccttccttcggcatgcttttctgcgtcaaaatcgtttccatcccacccttaaggaggccaaggctttgatcaagaaatgcgcgctctggctgcgggacagctttatccgcagccggagcctcaacgccacccggatcgtggcgggctccttcgcggcgattattctgatcggggcgttgctgctgaccctgcccatcgcctcccgggacggacagagcgccgggttcttcaccggactgttcaccgccacctcctccacctgcgtcaccggcctgatcctggtggacacgtggacccagtggactctgttcggtcaggcggtcatcctgaccatgatccagttgggcggcttgggcttcatgacggtcatcaccctcgtctccttcgccctccaccggcgtattggcctgtcggagcggcttatcatggtgtccaccctcaacctcaacgacatggacggggtggtgcgggtggtgcgccacgccctcatcggcaccttcgccatggagacggcgggggcggtgctcatgtcggtgtgcctcatcccggagttcggcttcctcaagggcacttggcacgccgtgttccacgcggtctcctccttctgtaacgcgggctttgatctgctgggagggcgcttcggtgcctttagcagcctggccggctacaacgacaaccccctgatgctgggcaccaccgccgccctcatcgtagtgggcggcctgggcttcttcgtgtgggaggacattgtggacaagcggtgctggagcaggctgtcggtctacagcaagatggtgctcctcatcaccgctgtgctgatcgtggggggcgccctgttcttcctgatggaggagtttgacaatcccgccaccctgggggacatgcccctctggcagaagggactcaacgccctgttccagtccgtcaccctgcgcaccgccggcttcgactccatcggccagggcggcctcagcgacaccagcaaggccatgtcctgcgtactgatgctcatcggcggctcctccggttccaccgccggcggcatcaagaccgccacggtgggcgtgctgctgctggccctgcgctccggcctcatgggccgggagcaggtcaccttccgcggccgggcgatccactaccgccgggtgctcaatgccatgactctggcgctggtggtgctgtttgtctttgtgttcagctccatggtggtgtccacggtggaggatctgccctacctggacagcgcctttgaggtggcctccgccatgggcacggtgggcctgaccaccgggatcacccccaccctcacccccttctcccaggggctgctgatcctgctgatgtatatgggccgtgtgggcatcctgtccttctccatcgcctttatcaccggaaacaggcatccggccaagatcaaataccctgagatgaacgtcatgatcggctgacgcgccgcatcaggagaaaaggaagtgttttccacgttatgaaaacctttgttgttatcggcctgggccggttcggcagcgccgtggccacagagctcagctccctgggccatgaggtgctggctgtggacgagcgggaggaccacgtgcagagggtggccgaaaaggtcacccacgccgtcaccggcgacgccagggacccctcggttctgcgggccctgggcgtgcgcaactacgactgcgccgtggtggcggtgggagacgatatcggaaactccgcccttatcacgcttaatctgaaggagattggggtcaagcgggtcatctgcaaggcacagagccacgtccaccgcaaggtgctggagaagatcggggcggaccgggtggtgttccccgagcacgagatgggggtcaagctggcccaggggctctccagctccaacgtgctcaacttcattgagctgagcgaggatttcggcatcgtggagaccgccgtgcccaaggagtggcactacgaaacgattcaaaatctggatgtgcgggcccgttacaaggtcaacatcatcgccgtgcgcaggggcaaggacggggcgctgaacgtggcccccggcgccagctatgttattgagccgggcgatgcggtggtggccctgggccgcacggaggacatcaaccatctccaggacttgtaaggaggaccgccatggagcgcatcaccagccggcaaaatccgctgatcacccgcctgcgcaggctgggggcggagaaaaagacccgccgggcccagggggtattcctctgcgaagggaccaagctggtgggggaggccctgcgctgggggccgccgccggagctgctggcggtggcggagggaaccgcccccccggcggagctgcccgccggggtgcgggtggtggaggtgccggaggcgctgctgcgggcggtgtccaccgtggagacaccccagggcatgctggccgtgtgccggacgccggacaccgctccgccggagacgctgccggagggccgcctgctggtgctggacggggtgcaggaccccggcaacgtgggcaccgtctggcgcaccgccgacgccttcggggcggcggggctgttcctgctgcccggctgcgccgagccctttgcccccaagacggtgcgcgccaccatgggggcctgcttccgcctgccggtgtgggaggggacgctggaggagctgaccggcctgctggcccggtcggccgcccccctgtatgccaccgccctgcgggacgacacggaggacatccgcgccgtcccgctggagggcgccgccgtggtcatcggcagcgaggggcggggggtgtcccagccggtgctggacgcctgccgggcgactttgaaaatccccatgcgggaccgctgcgagtccctcaacgccgccgtggcggcgtctgtggtgctctgggagggctggcgctgagccaggccgccccagcggacggccccaccccggtggggccgcgcgctggcgcggcacagaacaagacaacagccggaaggaggcaatcccgtggctgcgttaacctatctgctgtggctcaccacccgggagggcctccggcccgagacggccgcggcgctggtgcgccggttcggcaccgcagaggcggcctacttcgccgaccccggggagtacgaactgctttcattgagtgaaaagctttgccgctccctggcggacaagtccctggagcgggcggagcgcatcctgggcgactgcgaccggctgggcgtcaccctgctgacctatcaggacgcggcctacccggagcgtctgctccagctccacgactttcccctggtgctctatgtgaaggggcggctcttccgctttgacgaggagctggccgtcgccatcgtgggcgcccgggagtgtaccccctacggcgtggccatggcggggcggctgggcctggagctggcccggtcgggggcgctggtgctctccggcctggcacagggcatcgacgcggccgccctcaagggggccctccagggcggcggcccggcggtgtcggtgctggccggcggggtggacgtggtctacccccggcgcaaccagggactctacgaggacgtgaccgccgccggggccatcctgtcggagaacccgcccggcaccccgccggagggctggcgattccccatccgcaaccgcatcctcagcggcctgtccgcgggcgtggcggcggtggaggccgccgagcacagcggcacgctgatcaccgcccggctggccctggaccagaaccgggaggtgttcgccgtccccggtccggcggacgcgcccatgagcgcgggcaccaacggcctgatcgcccggggcgaggccaagctgatccgctcggcccaggatattctggtggaatatgtgacacgctttccccataaggtgcggcaggccccttcgctgtcccgggagggggcggaggcgcggctggaggcggcggccgagccggcgccggagccggtgccccgtccggcggagaggaatcccctccctctgcgcccccggagtgagctggaggccatgggggacgaacagcgggccatcttcgccctgctgagcggccgcgccctggtgcccgacgagatcgtgggccgcaccgagattcccgcccggcgggtgaacactgccctgaccctgctgcaggctcagggctatctgaatgagcttcccggcaagcggtttaccgctgccgtccgctttgacgactaagtatgtaaggagtactatgctgtggcaaaatcgaatttggtgatcgtcgagtctccggcgaaggccaagaccatcggcaaatatctgggcccgggctatgaggtgaaggcctccatgggccacgtgcgcgacctgcccaagagcaagctgggcgtggacgtggagcacggctttgaactgaactaccagcccattaagggcaaggaagaggtcattgacgagctgaaaaaatccgccaagaagagtgagaaagtgttcctcgccaccgaccccgaccgggagggcgaggccatctcctggcacctgaaggagatgctgggcatcccggacgacaagacctaccgggtgaccttcaacgagatcaccaagaaggtggtcaacgactccatcgcccacccccgggccatcgacatggatctggtgaacgcccagcaggcgcgccgggtgctggaccgcatcgtgggctatcagatctcccccctgctgtggaagaagatccgccggggcctgtccgccgggcgggtgcagtcggtggccacccggctggtgtgcgagcgggaggccgacatcaaggcctttgtcccccaggagtactggtccctggacgccgatctctcccgcatcgcccccaacctggggcagttcaaggccagcttctacggccgggagaagaaggtggagctgaacagcgaggcggaggtcaacgccgtcatggaggcggtgaagaacgcccccttcgccgtcaccggcgtcaagcgccaggacaagcagcgcaaccccgcgccccccttcatcacctccaccctccagcaggaggccagccgcaagctcaacatgaccccccggcgtaccatgtccatcgcccagcagctctatgagggcgtggacatcgagggggagggcaccgtgggtctcatcacctatatgcgtaccgactccctccgcctgtccgacgaggccaccgccgccgcgaaggagttcatcctctcccgctacggcgcggactactaccccggcaaggcccgggtctacaagaccaaatccggcgcccaggacgcccacgaggccatccggccctccaacgtgaacctgaccccggaggacatcaagaagtccctcaccgccgagcagtataagctctacaagctcatctggagccgcttcctggcctgccagatggcccccgccgtgtacgacagcgtgtccatcgaggtggcctccgcgggatacaccttccgggccacccactccgccctcaagttctccggctacaccgccgtgtacgtggaggggaaggacgaggaggaggaggcgttccagtcccccctgcccgatctgaaggagggggaggccctgaagctggaggccctcaagcccgaccagcacttcacccagccccccagccgctacaccgaggccacgctgatcaaggccctggaggagaagggcatcggccgcccctccacctacgcccccaccatctccaccatcctggaccgggagtatgtggtgaaggagggcaagaacctccgccccacccccctgggggaggtggtcaccggcctgatgaaggacaaattcaccgacattgtggataccgccttcaccgccactatggaggagcggctggacgaggtggagaccggcaaggtggactggaagagcctgctgggcgacttctacggcgactttgagcaggagctccagaaggccgaggcggatctggacggcgagcgcatcaaggtacccgacgaggtgtccgacgtgatctgccccaagtgcgggcgcaatctggtgtacaagtccggccggttcggccgcttcctggcctgccccggctggccggagtgcgaccacacccagcccatcgtcatcgagatgcccggcaagtgccccaagtgcggcggcaagatcctcaaaaagacctccaagcggggatacgcctactacggctgcgagaacaactccaacaagaacgaggccaagcggtgcgatttcatgacctgggatgtgccggtgaaggagatctgtcccgagtgcggccataccctgttcaagaagtcgggccgggggttcaagaagcccttctgcatcaatcccgagtgccccaacttcctgcctgaggatcagcggggctacaagaaaaagaccgcctctgcggagagtccggcggagggcgcccctcctgaggaggagaagaagcccgcccaaaaggcggcggccaaaaagaccaccgccaaaaagccggccgccaagaaggcggccgctcccaagaaggcggcggcaaagaagccggcggcgaaaaaagccgcggccaagaccaagagcgaggcctgaggcccgcttccaccggtggaagccgtcagggattccccctgacggcagactcagttgaaataccggaggaatgagatcatggaaacccaagagagaaagctgcgcaccaacctggacaccgacctgctcaagctggtcgccatcgccgccatgctgctggatcacattggcggggccttcttcccggagacgcccatattccggtggatcggccggctggccttccccctgttctgctactgtatgacggtgggcctgctctacacccacaacatcaggcgctacctggggcggctggcgattttcgccgtggtgtcccagcccttctggattctcgccttcaacgccgacgacatcctgggcaacctgaccaactggaacatcttcttcaccctcttcctcagcctgctggccatgtgggggctgaccacccggcgctggtggctctttgtgctgggggttctggtgctggccttcggaagctttgactacaactacaacggcgtcattctgatgctgatcttttacttctgccggaacaaacccgccctgctggcggggctgtacatcctgttctggcttcccgccctgtggggcggctccctggaggatcccctggccctggtggtgggcggccacgccgtcaactggacgatcttcgccctgctggccctgccgctgatcctctgccgcacccactccggactcaggattcccaagtggttcttttacgccttctatcccgcccatctggcgatcatcgccctggtggggtggtgcatgggcgtgtaaccggaaaaggagtgtgttgagatgaagattctgctgctcaacggaagtccccggcccaacggtaacaccgccgccgccctggacgagatggaggccgtgtttgccgccgagggcctggagaccgagcgggtgcaggtgggaaaccgggttatccgggggtgtatcgcctgcggcaagtgcgccgagctgggccggtgcgtgttcgacgatctggtgaacgagttggcccccaagctggaggcctgcgacgggctggtggtgggcagcccggtgtactacgcctcggccaacgccaccctggtggccctgctgacccggctgttttactccaccccctttgacaagaccatgaaggtgggggccgccgtggcggcggcccggcggggcggcctgtcctccacctttgacgagctgaacaaattctttaccatcagcggcatgccggtggcctccagccagtactggaacagcatccacggccgcctgcccggcgaggccgcccaggacgccgagggcctccagaccatgcgcaccctggcccggaacatggccttcctggtcaagagcatcgccctgggtcgggagaagtacggcctgccggagcgggaggagcctctgcgcacccacttcatccgctgagtcccacacaaggaggaacccatggaaccagttattgtaatcggcgcgggcctggcgggctcggaggccgcgtggcagctcgcccagcggggcgtccccgtcaccctgcgggagatgaagcccgccaaaatgacccccgcccaccataccgagtggttcggggagctggtgtgctccaactccctgcgctcggatcagctggagaacgcggtgggcctgctcaaggaggagctgcgccgcatggactccctgatcctgacctgcgccgacgcccaccgggtggaggcggggggcgccctggcggtggaccgccacgggttcgcccgtgcggtgacggagaagctccgcgcccaccccctcatcaccgtggaggagggggaggtcacccaaatcccggagttggggaacgtgatcgtggcctccggccccctgacctccgacccgctggcggaggccatccgggccttcttccctgagagccgcaccctcaatttctacgacgcggcggcccccctggtcaccttcgagagcgtggacatggacagcgccttcttcgcctcccgctacgacagggggaccccggactacatcaactgccccatgacggaggaggagtacgacgccttctggaccgagctgtgcgccgcccaggaggcggaggttcacggctttgaggacaagcatgtgttcgagggctgtatgcccgtggaggtcatggcccgccgggggaagcagaccctgtgctacggccccctcaagccccggggcctgaacgatcccaagaccggcagggagcccttcgccgtggtgcagctccgccgggacaacgccgacggcaccatctacaacctggtgggcttccagacccacctgaaatggccggagcagaggcgggtgttctccatgatccccgccctcagaaacgccgagttcgtgcgctacggcgtcatgcaccgcaacacctatctggactccccccggctgctggaccgctattaccgggtgaagaaggagccccgcgtctgcttcgccgggcagatcaccggcgtggagggctatgtggagtccaccgcctccggcttcctggccgccgtggagctggcccggcggctggagggcaagccccccgtggacttcccccaggagaccgccgtcggcgccctggcgcgctatatcagcaacgagagcgtcaccgacttccagcccatgaacgtcaacttcggcatcatcccgcccctgggctaccgcgtcaagggcaagcggaacaagaacgccgagctgtccaaacgggccttggagcttctggacgggctggactggcggtaggggcggccacaaaggccgcccctacaggagcaccgggcggccccaacacgtaggggcgacccttgtggtcgcccgccctgccgggcgcacgtccgtaggggcggatgcccacatccgcccactgccgcggggttcccgcaccgacaccctggggatcggacagaacgggcggccataaaggccgcccctacaggaacgctgggcggcccaaacgcatgggggcgacccttgtggtcgcccgccctgccgcgcacgcctgtaggggcggatgcccacatccgcccgctgctcaaggcagcagttccatgaggagacgcccggccagacggaagccgtgccggaagcaggccagccgctcataatcggacatttcgccctccagatcgttgaggcggtcgagaaaatccagcccgagggaggcgcggatctggtcgtggcaggcgctgatgcgctccagccgctcttgatagccgggggcttgacggaaatccaagtgcctgttatccagctcatgttctaagagctgctgtaggaaatcattcattttatcaacaccccactaatagtgtggatttagtatacacgctattagtgggaaatgtcaaggggggattcggtgtattccaatgatttgtttggcacacggctaaaatgcctaagaaaagataggggagaaactcaaaaagacttggccgattttctcggtatcaaacaaaatcaaattggtgaaatggaaaatggccgcaaggcatctacctttgccaagcttgcccttttgtgtgagcactacaacatcagcgccgactatctcctgggccttacggacgagccccggcctctgcggcaagacgatggggcggggcgatgagggcatcgccccctacaggaacgctgggcggccccgccccgccgggtgcccgcccgttgctgccgtttatccaggaatgaacagagaaagtggaggagaacatatgaagatcatcgtagacgccatgggcggcgacaacgcgcccgtctccaacgtgcggggcgccctcgctgcggtgcgggagctgggcgtggaagtcattctggtgggccggggggaggacatcctcaaggtgctcaaggaggacggcatcggcgaactgcccccggggctggagattgtccacgcctccgaggtggtggagatgtgcgacaacccggccaccgcctttaaggagaagaaggactcctccctgaccgtgggcctgaacctgctgaagaacggggacggggcggcctttgtctccgcgggcagcacgggggcgctgttgtcggcggccacgctgatggtcaagcgcatccggggcatccgccgggcggccatggccccggtggtgcctaccggcggcggcggcgcggtgctcatcgactgcggcgccacggcggagggtacgccggagtatctgctccagttcgcctttatgggctcctattacgccgagcgggtgctcaagcgccccgagcccaaggtgggcctgctcaacattggcgccgagccctccaagggcaccgacctccagcgggaggcctacgccctgctcaccgaggcgggcaaggccgggcgcatccacttcgtgggcaacgtggaggcccgggaggcggtgtacggcgaggtggacgtgatcgtgtccgacggctactccggcaacatcttcctcaagaccatggagggcaccggcggcttcatggcaaagcagctcaaggccatgttcaagaagaacctgctcaccaagctggcggcggtgctggtttccggaggcctgcgggacttcaagaagatgatggacgccggggaggtgggcggcacccccctcatcggcatctccaagcccgtcatcaaggcccacggctcctccgacgccttcgccatcaagaacgccatccgccaggcccagagcttcgcggcctccggcattattgaggacatcaccgaaaatatcgaccacatgcgcctgcgcagtgagtaaatgggaaaattttgactttcctattgacaggcgggagaaacttgcctattatcatagtgcaatgacaccgtcgggaacgacggaagcgacaggagtagatgaacatgattttcgagaagctcgccgccctgctgtccgaacagttcggcgtggacgtggacagcattaccatggacacctcgtttgaggatctgggggccgactccctggacatcgtggagatgaccatggccgtggaagaggagtttggcctggaggacatggacgaggaggatctgtccggtatctccaccgtggcggatctggtccgctacctcaagtctaagctggaggactgaagaaaccaaagagaccggagccccgcctcccggcggggctccggctttgaaagggaggatcggccatggaggcattggaagaaaagctgggttaccggtttaccaaccgggcccttctggaaaacgccctcacccacagctcctacgccaacgagaacaaggccaaggggctgcagagcaatgagcggctggaattcctgggggactctgtgcttggtatggtcgtggccgactacctgttccgcacccaccccgacctgccagaaggggatctgacccgcacccgggcggccctggtgtgtgagggcagcctggtggaagtggcccagtgcctggagctgggcgcctacctgaagctgggcaagggggaggaggccggcggcggccgggagcggccctccatcattgccgacgcggtggaggcggtgctggccgccgtgtacctggacggcggcatcggctcggcccggaagctcatccagaagttcatcctggaccgggaggcggagaagagcgccagccgcgattacaagaccgccctccaggagctggtgcagcgggagagcggccaggtgctgggctaccagctcatcggcgccgagggccccgatcacgccaagatcttctcggtggaggtggatctcaacggcatccccatcggccagggccgcggccgcagtaaaaaagaggcggagcagaacgcggccaaggctgcgatagagaagttaaaggctggggaataaccggccgctccgcctctcttgcgagcggaagcgagccgccgcgtcagcggcgtcaagcattttgcggagcaaaatcttgatgccgggcggattcactccgcccggacagatggagagaaacgggggccccaaaccgcctgcggcggtttgggcggcggagcagaatgcggctaaggctgcgatagagaagctgagggcgggggaataaccggcccgcgggcgaccacaagggtcgcccctacgtgcaggggctgtccggctcctctgtaggggcggcctttatggccgcccgtcctgtcaggccttcacagggcctggggcagtgcaaaacctggtgtacggcgggcggatgtaggtatccgtccctgcgaaatggtttgcccgctgtataccaccaaaccagacgcggagcgctcaggcgctccgcgtttttatggaaaagggtttgcaaaggacgccgttccttggtataataatttattcagaatgataacatggcgaggtgcagaccttgtatttaaaagcgctggaaatccaggggttcaaatcctttccggacaagacggtactctccttcggggaggacatgaccgccattgtgggccccaacggaagcgggaaatcgaatatctccgacgccatccgctgggtcatgggggagcagtcctccaaggccctgcggggcggcaagatggaggacgtaatcttcggcggcacggcggtgcgcagacagcagggcttcgcggaggtctccctggtgctggacaataccgaccacatcttcccgatggaggagagcgaggtgatggtcacccggcggtattaccgctcgggggagagcgagtactacatcaaccgccgttccgtccgcctgaaggacgtgaacgagctgttcatggacaccggcctgggccgggagggctactccatcatcgggcagggccgcattgacgagattttgtccgtcaagagcgccgaccgccgggaggtctttgaggaggccgccggtatctcccgcttccgccaccggaaggaggaggccgagcgcaagctggagcgcacccaggagaatctggtgcgcatcaccgacaagatcgacgagctggagctccaggtggagcccctccgcgcacagagcgagaaggcccggaagttcctggtgctgcgggacgagctgcgggggctagagatctccctgtggctggagcagttggagaaaatacgggcgggggccatcaagaccctgtccgactacgagaacgccgtccgccagaaggaggaggcccagggggcggtggaggccctctacgccgccgccgaggagcacgccgcccagatgcgggacaaggacgtggaggccgagggcgtccgcttccagatgatgcagcgggaggccgacgccaacggactggaaaacgccgttgcggtactccgggccaacatccagaacaacctggagaaccgggaccgcatccggcgggagctggagcagcaggaggggcgggccgactccatcggcgcccagattgccgagcggaaggaacgtctggaggcgctggtgggcgagctggacaccctggcggcggagctgtccgcgaaacagggggaggccgaggaggccgtccgctccgcaggcaccctggccggagagctggaggagctgcgccggaaggaggcggtggaaaacgcctccgcctccgaggccagggttctgctctccgccctagccgccgcggcccaggagctgctggaccgggatgaggcggtgcatcaggagctgtccgccggtgaggagcgggtgcgccagcttcaggagggccgggacgcggcccaaaaggagctggcccaggcccgggaggaccgggattcccttcagaatgtgctcaacggctacggcctgcggctggagtcccgccggaaaaaagccaaggaggccgaggagcgccatgtcaagctccagatggaggagaacgccctccactcccgtatccacatgctctccgagatggagaagctctacgagggctactccaaggcggtaaagctggtgatgggggaggcccggcggggccagctcaagggggtccacggcccggtggccgggctgctccacgtgcccgaccactgcaccgtggccattgagaccgccctgggcggcgccatgcagcacattgtggtggagcgggaggaggacggcaaggccgccatccagtacctcaagcgccgggacggcggccggagcaccttcctgcccttgagcaccatccgcccctccgacttccgggatcagggcgtgcggagggaggcgggcttcgtgggcctgggggacgagctggtgcagtttgacccccgctaccagaggattttttccaatcttctggggcgcaccgtggtggccgaggatatggacgcggccatcgccatggcccgcaaatacggccaccgcttcaaaatcgtcaccctggacggccaggtgctcaaccccggcggctccatgaccggcggctcggtgtcccgcagcgcgggcatcctcagccgggccaacgagctggagcggctgaaccggcagcgcgccggtgtggaggagcagcgcaccgccgccgcccaggccatggaggaggccaggcgggaggccaccgccgccgcatacgaggtggagaccgcccaggcccagcagcgccagcacgaggacgccatcctcaagctggaggagcggctggcccatttcgacgcccagctcaccgatgcctcccgccggcgggacgagcagcgccgggagctggagcagattcaggcccgctccgcccagaccgaggcggataccgccgccgcccgggcgcgcattgaggccctggagggctcggccgccgccctgcgggccgaggccgagggcaaggcccagggccagagcgagctccaggcgcgcaccgccggtatccgggaggccatcgcggagctgaacatgcgccgggccggcctggaggcggagcagcaggccgccggacagagccttaccgagctggaggccctgcggcgggatctcaccggcgaccgggccgagcgggagcagatgctcaccgcgtttgaggagaagaacgccgccctggaggatgagattctggagaaggaacggcagctccaggccatccgccaggagaaccgggagcggcaggaggccatcgcccgcatcaatgaggagaagctgtccctggaggcccggcgcaaccaggccgacaagcaggcgcgggacaaaaacagcgaactgttaaacttagagcgggaggtctccgtcttagaacagaggaaggccgccgctgccctggaggagaaaaccctgctggacaagctgtgggagacctatgagctgtcccatgaggccgcccgcgcccagcgggtggagctggagagcgtccccaaggcccagcgccgggtgggcgagctgaaaaaggcgatctccggcctgggcaatatcaacctggatgccattgaggagttccagcggatcaacgagcggtacacctacctgaccgaccagcgggacgacgtgctcaagtccaagaaggagctggagggcatcatcgccgacatcaccgaggagatgaaaaccatcttcgcccggcagttttccgtcatcaacgaggcgttccagcagacctttactgagctgttcggcggcggcaaggccaccctggagctcgaggagccggaggacatcctcaactgcggcattgaaatccgggtgcagccccccggcaaggccctcaaggtgctctccctcctctccggcggcgagaaggccttcgtggccatcgccctttacttcgccattctgaaggtgcggcctacccctttctgcgtcatggacgagatcgaggccgccctggacgacgccaacgtggtgcgcttcgcccgctatatgcgccaaatggcggacaagacccagttcatcgtcatcacccaccgccgcggcaccatggaggaggccgacgtgctctacggcgtcaccatgcaggagcagggcgtgagccggatactgaccatcaacctgaacgacgtggagaaggaattgcacatcaaatgacgccgggcacggcgggcggcaacacccagcgggacgggccatacctgtgccgcagggtg

SEQ ID NO: 344 - DNA, 268140 bp, Flavonifractor plautii
  source 1..268140: mol_type = genomic DNA
ggtagcagtagagaaacagattttcctcccccttgtaggggtgcagccggatcagataggcatactgtgctgtgtccgcccggaagccgaacgcaaagccgctatcgtagccgctctcctggtgtccccggcagaaatcccgcatggcgtcacggctttttagaaacccgccgtactgctcgtcccccaccagggcctccaaaacctcctcaaactcctgctgaaagtcctcggtgtccaggctttcccggtggctggtccacttgggaaagaagcccttgccgtcctcgcccatatccgcttgaaggtgcccgacactccctgtctggccctcgatctgtgtgctttgcttggcgatataaagccgctccgctggggcagcggcacgaaaagtcagttccattatcgctcacgctcctttatcttcgtctgttgggttggctgtgtcagtcctgcctcatgcgcctgccagtagtcgggatggcatacccggatagtatcatcaatacatttgctgaattgtccaggggcaaagtattcattgacgggggcggtgtagagccccctgtccatcaactcccggaggacgatctgcgcatcgctgtcctcctcaaaacacagatagccgccttcccagaacccgtgccgctgggcggcggatgataaattcccggctgctgcctcccgtgccaccatgatcccgccgtggctggctgtggaaacatcaaagaagccggggcagagggtcttacgggtctgaatagctccccagggtgaatatgccggttcacaaaacatagcttcacactccttttcacgcatctatcgtgtactcctttccttggttgtcccccgctggatgccctgcaaatggtcttttgcccactgtggcagacactccggcctgacctcgcctaaaatatcaccgcgctcccaccgaccagccctgcggcctgtgaatacattgacgccgtagaccgaagtgccgcgggaattcgctcgcgccccgctgcctcctgtcaccaaaaacaactgacaatccgctctttgatattcataacgcagggaagccggcttgaccgccaccaccttgccggtgatgtcatcgccgttcagaagcggaaagcagtgttcacggtccagcatatccagcgggatgtggagggtcctgcgctgcgcctgaactgccgctatctgcccttttaccctgtccgcgtaaagttccatgatctccaggtagtcgttgctgctcatggcctcagaataatactcagcaatatcattctggatgcagaagcagcacatgaactcctgctccgggctgatgcccaccactacctcctgcgccccgatctggagcgagtggataatctcaaagttttggatcattcttttcttctctcgcattaccattacctctcccggtcatcacgcggcctgcgttttttctggcgggcctgttcctgctgttccttcacatggtctgccagggatttggcgggcttatcgtcaaaggcaattagaatgttttgcgggggaacacctcgcagcatcccggataattccgtatccatatctttttctttgcccatgctcatcgctcctctctaactgaaacggagatctgcctgtcctcgttggcaaatctccgctctaattgctctactgtccaattttttgtgaattgccccaaagggttgtgcccaaactgcgcaatggcccgccgatccatctcccggagccgtgcccacaattcaggatgatgggcgcgcagttttttcagctctccgatccgttggagggggcagcaccaacaggaacagcggttgtatatccgatacagaccgccccaatcaaagccccggtcatagcatatctgcaatgcttcagcctcggtgatttcccaatctaccaagggatatttttcctccttgactcgctttggctcatctgctgcgatgcccacataatgcagagcgttccgctcttttttcaggcggtttacctctttccgaataaggtgtgtctttaactggcccgtacaccagcgcacgaggggaccaggccagccgttcccatagagaggtacgcccaacttctgccggttctcaatgctggactgctttacctttggctcctcaaacatgagccattcaaagcctttggggtgccgcaggatcgtgatatgaatgccgcgttcccggcagagcagatcgtccagtttttgaatatgctcatacatctccgggaactccatgccagtatcagcggtcagcaccacatcaatgggcatatcccgttcgatcatcagcagaagcatggctgtgctgtctttacctcctgagagggaaacagcatgatagctttcacccgcatttccgcccatgctccagccccctccccagggcagggcataccttgttggtcgataaaaacaaatacatcatttttggttcctcctgtccaaatatttacaccgccctatgtccggcggacaaagagcggtgtatgtatggaggaaccctttattttcagctcatcagttttaccagcagatcgttcactggtccggcatcccggccctgggcggtcagcttgttccgccactccatcaggtacatccgcacaaggcggcgctccgcgtccgtcagttccagatacactttcttttcccgtttgaacatttgaaacaactcccttctctctgcccatatcgtacaggaaaaggcaaatggtttcaaatgtgcgaatgggtatgtaagcggcccgctgtgcgggccgcgggggatgcgcttaataacccgtccggggcaggggcttggagggggcgtagaccttcgtcacccaccgggaggtagccatgatccactgaccgtcatagacgccgcccacatccgcctgattgacgaattggctgccgcctttgacccaggacaccacggagcagtcgatcatgggcgtttccacctgccggaagttggagggcacgacgccaaacacgaacatcacctctgtgacatactcgttggaccccagccgcagggccacaggcgaggcgtccagcacatagttctgctgcgtgttcaggctgtccgccagcacacggtactcgctcccgctgagattggtcttgtagacgatcttatagtttccagcagcattgtaggtgccggtggtgatcttcgccagccgcaccgcctccacgggcagggtatcgcgccagtagaacgatgtgagagaagtcgtggagttgttggcgatgccggagaaggtgtagcggatattctggccggacatgacctcggcatagccggttttctggatggctacattggtatagaggctcttgttggtcatggccgccttgacgatctggccctcatgctcgatctccacctcaatgggcgttttgtccaaagcatagaagtccgccgcctgggactccacgattttgtaccggcccaaaggcaagggcttagatacggccacaccgtttttatcggtgcagatggtgtccacaaggttcccggtgcgggcatggtagacttcaaatatggtgccggggatgggggtgccggcaggccagccgttcatggagttataatcggcgctggtcttagtcacctggatttggccggtgacggcggtattctcccaggtgatggtggtgcagccgccataccggacgtagaaggtcttgggctgggtgtccaaaatatagccctccgcgcactcgatctcccggagagtgtaccggccatcctccagttcccggtcgatatacacatagccctcgttgtcgctggtgtactgaccaatggggtggcccttggcgtcagagagcaggaacgtcacgccgtaaatgcccttgccggtcacgctgtccaccttgtggatgacggcgctgccagtctgccggttggtgatctccaaagtggcggtctgtccgtccttcacctcgatctggtggggcgtatcatccagccggtagccctcggcggctttcagctccaccacctgataccagcccttttccgcttcgggcaggttgataacaccgttgcggtccgtggtgtaggtgccgatgatctcgccgtccagcttgcggacttcaaactccacgcccttgatgcgctctccggtttcctcgtcctttttgatgatggtgaggccgccgctcggtgtgttgtagaagcggagggtctgtacctcgccggctttgatctggatagacttgggtgtggtgtccaggacatagccttccgccgtcttgacctcccgtgcggtgacagtggtgccaggggtcaggtcattgatgataatgcggccatgttcatcggtgatgaactcgccgttgctgctgcccactaccgcgccggagctgtcggtgacaaggaatgtgacgcctttcagcggagtagtggtgccctcaatatacttctcaatgaccagggtggtgctgggggtattggtaaaatggagggtctgtgtgtcgttgggggtcacaactacggtctgggtccgggtggcctcgtcgatggtatagccggggatggtcttggtttccgtgaccaccagggttcccaccacgccgttgataacgattttaccgtccttgtcggtgatataaaggccgttgctgctgatctggccgttttcagccggtacaaactcacctgtggaagtggtgacgcggaacgtcacccccgccagcggcttgccgctcagagagtcccgcttatcaataaccagggttcccgccttggagttttctacaatgacggtctgcgtatcgccgccctgcccgatgaccacattggtgctggggctgtccatgacgtacccagtgggggccttgatctccgtcagcacatacgcgccgggggcgaggttggtgatcttgatctcaccctgggcatcggtggtaaagataccgttctgcgtaagggtgctgtccccgatcacgccgtccagccctacctcacagcccgccgctgtcgttacccggaactccgcgccgggaaggggctggccggtggcgctgtcccgcttctggataatgagagcgccctttggctgattcttaaaggtgagggaaacggtgcggccctccttgatctggacggtctggctctgggtgtccaggatgaaaccgtccggggcgcgagtttccgtcaccaccacgctcttgccgggtttcagaccggggatgcggatctcgccgttctcgtcggtgcggtagacgccgttgctgtccccaatcagggtcccatcggcatacatgaccttgaactcggcgttgggcagggtcacgctggggttggtggcgcagaccttgcggatcagcaggatgccgtccggcgcgttgtcaaaacggacggtgacaacgctctgctccccgctgtccgccaaatataccgtttcagatgcgttgataatggaatacccgtccgcagggtctacttcctccacgatataggccccgcttttcagcccggtccaaatggcggtgccgtttttcccagtcactttctgaccgatggtggtgccgcccgtgccgctgaccccacccagatacttcagttggaaggtacagccgggtagggcctcgtgggtcacgctgtcgtacttctccaccacaatcgcgttgagcggttcgttctggaatgtgacggtcttgctctcgcctccatggaggatgatggtctgcgtggtcggctctttcatttggaagccgggagccggttccacttctgtaatggtaaactcacccggatagagccgctttccctgctcatggagcttgatttcgccgttggcgtctgtcagaatttctccgtagtcgatggtggcgggcgcgtccgacgcctcgccgttgctggtataggtcacatgaaaacgcgccccctccacgggagcgccagctacgctgtcctccttatagatagtcagttccggagccttgtggttctcaaataccagccgcttttcatccccggcgttcaggctgaccgtctgctcccggtccgcgtccttgtccggcaaatagtagggggccggaacggactgttcgatcaccttataactgccgggggccacccgcagggacaccgtaccgtcctcgccggtggtcacatcgtttcgatagtcgctgtcaataccttcaatagtaaaggtggtgccggggatgggggtggtggagtcggcggcgtccaccttagcgatggtcaaaagaggctgtttcaggttatcaaaaatcagttcccgttcctcgccggggccgaggtagacggtctggatgggttcatcccccaccacataagggtcgggaacggatttctccgtcaactcatagctgtccacagggatatgagagagggtggccctgccatcctctccggtggtcacatcggtatggtaaccggaatggatgcccttgacttcaaataccgtaccgggaatgacctctttggtctgctcatcccgcttgagaatggaaaggctgggcagcttcttgtctgccgcctccacggtgatggtgccgcctccatccacagtggcctgatccacatggacaatgaccggatcagtcaggcaggcgaaaggcgcaggggccgaaacctccataaaggcgtacatcccctcggtcacattagggacagtgatggagccgtccgcttgggtggcctcggtgccgatgatctggccgtccctgacgatgttgaatactgcaccggggaggggatcgccgctgtcgtcgtacttgaccagtttgacctttaccctggcgtcgttctcaaacaccaaggccacatcattctttccgtcccagtaaaactcctgcttgaccttatccgggtccgggctgagggagtacccctccgggggcgtgacctccgtcgcggtaaagctaccgatgggcagggcgtcccagggcacatcctccagatagccccccgccccggtggtataagtgcccacaaagctgttgtcggtgccttcaatcttgatgactgctccggccaaacccttggtaggatcatccgcatccaccttacggatgctgccttcgctggtgatctccgggctgtccaggaaggtgacggtcacggtattgctgccgccattgggcaaagccacatactgcggccccgcgttgtcgatctcatagccctccggagcttccagttcaacaacggaatatgtggaggcgtccagaccggacagggtgtaggtcccatcgctcccggtcacgacctccttctcgtaggtcccgttttccgagcgcacgatgaaccgcgctccgggcagacccttgttggggttggtggcgtccacctttttcacggtcagatcgtatttctcgcggataacattcagctccccgatcataatggcctgcacatccttggcctgatgggagctggtgctggagccggtataggcgtactcatggacggtacaatcgccccatacgccctgtttgcccaggtctaggatatattgggcacggtcgcggaaggacatcccatccagcaggtcatctacaccgctgtaattgccgtggtgcaggttattataaacgcagaccaactcctcggcgcaggcggtggccgggtccgtcagcaggccagcctgatagcgccagatgatagcctgcacccaagcattcatagtccaggaataatcgctgccccacacctcgtctacgcccaaggcatgagcttggtcggtaaacacgccggtggtatgggcatagtagtaggccatcatggtctgcacggtagggtcggtgatgggctcggggttgccccaggtctggccctccagggaccagcccatgcctttcccgtgctcggcacagaagccgatagtgcttttctggttgtaatcgaaggtcatctgatggagccagcaggtccccaggctgggagattcatagtggacgccattgtgggtgcagtcctccagcttgatagagctgggggcgtccgccgccaacgccgcggtgggcagcaggcccagcatacacaccagcacgagcagcagggccgtcatacgggtgagaaaacggtttttcttcatcagtgaaaaactcctttccgtttttgggcataagaaaaggccctccagcctggggctgaaagacctctccgtgtccgtgttcagttctcaattattcgtagggattgtgggtgtttgggcgacccacgaacaggtagcaataggtcacgctgccgctctctgtcacgcccacgccgatgctgtcacagtccggcttaatcatagtttcaaaatggccgggggagttgagccagttgtccagggcgtgttgagcggtgtcctccgtggaaacgccggtaaacacagtcagatttacgccgaagccatagggatagccgcaggccagggccgcctcgcattcctccttggtgtggtgccaggtgtacttcttatcggaaatggtttgggcggcgctcatcagggcctcactgacaggcagttccgccacaccgttctcccggcgcacctcattgaccagccgtaccagctccagccgcacatccgacgcctctccttggtcggggctactctcgacggtgggagcctgcggagcatgggagccaacggtcagcgtcagggtggcggtttccccagtctggttggagacggtgatctccgcgctcccttccgctttggcaacggctgtccagaagttcatcacctgttccacctccaccgtgtccgggtcgctggaagtcacggtgtacgccggcccgccgggaccaatcaccaagccgctgcgctctcccacctccagcgtggtgcccttgtagctgcctacccggatgggctgatcctccgccgcccgcgcgggaagagccagggcagcggtcagggctgtacaggcgaggactgcggtaaagcgtttcagactgtttttcatcatggaatgacctccttgtgatagattgggatgcctctgtcccaactgtaccataagagggcaaaaactgtctaaggtgcaattttcttttcagcgggtggttatgacacctccacggctcggaccgcccaacggtaggcgctctggttgcggacacaggtaaagagggtgatacagttctccgcagtaggagacagcagggagttgtccagttcgctgattttgttcacactggtcacggcgtaggtgcgcttgcccagcttggtggtcagggtgatcttatctcctacatccagcgtatggatctccccaaaatggtcgttcacgcccctattatgggcggccaaacagacgtttccggcccaaacgctggtgtcctcaaaatggcccgcaccctttctcagcacggcgcttcccgtcccctcatagaccttcacattgacatcaatgctggggatttttaaggtggcaaggtagccgccctgatagtagaggtctgatgtgacctccgtgaagccgatggtggggaggacgctggatgtgccgccgctggggaagccggaataatcaggcggagcgacggtggtgccggcgctgccattgataacggcaccatcgcccagcatatagccgggggccaaattgggggtcagcggagtgccggtattcagggtgtaggcggtggagctgccaaaggcgggcgggactagagccgcgtttttgctcacatccacattggaaagctcaccacggtccgccgtggcaacaggctccaccgaagtcggcttgccgtactccgggtcgccgggggcggagatgttatactccaatgcgctggcgggaacagccagggccgcagttaggtacagcagagacaaaagcatggtcagtttcttcattatcgtattacctccgtcgcttgatgaagtagaacgccccgcctccaagcagcaccgccgcgacaacggccacaaccggcaggacgctgttcttctctccggtctgggcctcctgcccggtggaatcagtctggtcgacgggggtgttggggtcggaaatatcttcaggggttgagtctaatgctgtgccctcgaagatcgccacatagcggattttattcaggttgatacggctcacggtgcccgcgtagtcggcggtgacggtatagcccttcacataggaactggtggcggagccggagtaggaggccatagcagtaaagtggccgtccccctcggtctgccagttaacggtttggagggtcatggaatttccgccgtcctggatagtcttggggatatactgcgtgtcctggttggcaaggccggggtaggtgcgggtggcggtcacggttttggtggagctaccatacccggccacctccaccttcaccgtatccagtttcagagtcagcaccccggacaggccatcctccgtgataaactcctttgtctgcggcagcagggccagcaccgcgcccatgtccttgctcttgctgttcacggacacagtttctgtatgctggcggctctcgttggcggggagttcctgtttcagcaggtccgtgagggtgtagtggtagccgtcctgttcaaagtcggaccgggggatgccgccggggtcatcctccggccccaggtcgtacattttcctgatctcagtaccatcctcgctccgggtgacggcggtgggatagcagggggacggctgggtgggttcagacgggtcggcggcaagggcggcaggggccaggctcatggaaagagctagggcgcacagcagccgggccgcgtgggtcaggggtttccgcttcataacaaaactacctccatgtttttgattttaggcacaaaaaatcctcatggcacgccatgaggtccgacaatgcctgtgtttggttttcttgcgcgctgttctccaaaggattctactggctgaaaaaggatggacagagcctttcttttcagctggtacagcaggtttcgggggagagtgtgagagggggggagcggcaggcgtaccggggccgtaaaagggcagaccatcccccaggtgtggcgttcatcgctccatctccctctgccgcttgcggtacagctccaaagccttcacgatagtgtcctcgattttctgcgcgggcgtccccggcttgaaaaacttgtcgatccgttccctgggaattttgaattgctccacctgattgggcttttcctcttgcatgatggagaggatcacatcagggttcaacttgccttgctcggaaaagctccgcattttgatggcctgggcatgggatggggtgcggatttctccctccatgacctccagcaaggcggtctgctcggcctccgacagataggacagctccacggcggggcgcagggccatttgcagcttgccggcttctttcagcacagaattatccaccatgtccagcaactccgggataaggttggttaggcggatatatcttttaatttgtgtcacactatcggggctttgttcagacagttccttgttagaacgcaacttcggacccactggggccgaagttaaatctgtccgcataccttgccgtttcatggcttccagcttcatcttataggcaaacgccttttcggatggcaatatctgttcccgctgaaggttgctgtccaccatgacgatgatggcctcatcgtctgtcagctcccggatgatacagggcaccgtgggcaggcccgccagctccgccgcccgcttgcgccggtggccggacaccatctgataactgccgtccggcatgggccgcaccagcgaggggactaggacgccatactgctttacactgtctgccagctccaccatgctctgatccatccgcaccttgaacgggtggttaggaaagtcgctgatctccgcggcagacaggtcggttacataactgcgcttggcattgtcccgttcttcctgggtagagaataggtcgttataagcctcgttcagccccaggtcgattgcgattcctttgttcaagggcaatcacctccttcaccagtgtggtatatgccgcagctaccttccctttactgtcatgggcgaaaatactcttgccctccacgctgcactctgccgcccggacagagaagggtatctccgtattcaatacccggagattgctcccagtctgccgcagggccgcgatgatgcttttggcattgttggtacggctatccaccatggtcagcagaatgccgtcgattttcagcgatgggttgatctgccgccgtaccttagccaccgatcccaacaacagcttcaaacccttggtggacaggtagttggcctgacatgggataagaacgctgtccgccactgccagagcgttgatggtcagcatacccagcgatggcatacaatcgatcagaacgtagtcataatcccgcttgaccgtgcccaggtagctgcgcagcacaaattcccggcttatggtgttcacaagacttacctcaaaactggacaggccaatgttggagggcaccagatcgacaccctcaatatttttcaagatgcccctgtcttgtggtgagaggatgccattgtccacaacgacttgcatcaggtcagagatggtcgtttccaactcgtccgggttcttcacacccaggctcactgtaagacttccctggggatctgcgtccaccaacaacacctttttcccttgctgcgccagtccaacgcccaaattgaccgccgtggtcgtcttacctacgccgcccttttgattggtaacagcgatcactttgcacttgtccatgggctactacctcctcttcttcggttatcgtcatagccgtttgcggcgcttgccccacacaacggctatgtaaagtgggccggcggcccacctggggtcactggcccttttctgtgagaaatgccagagcatcctccataccagcgtcaaagatgaagtcctcgctctctgccagaaattcctccatgaacatctgtgccagggcggggtgctgctggcagtcggtaaagttctcggacggggcgatctccaccatggcgtaaataccctccagcaccttcatggccccgatgtagttgccgtggctcaccaggagccgcagggctttttccatagcccgcaccatgtccaggtcccccacctccaggaaagcgttccacagggcccctgtgctcttgctggcggcgctgcgaacctccctgatcagcttctcaatgcggccctcactgtcctgtacctcgttcttcttccacttcatgacttgtgtcctcctactgtaaattcatagctgtcaaaagagatttaaacggctatgtaggtttttaggcagggcgaaaatattcaaaccggcaatcgctccatttttccattagcaaggggtgatactgtttttttgcccgattagcaaaacacctcttttttcggtggaaaaacgaaaaaccttgctaattgattagcaaggttttggacgggaaatggtatgtagttcaatttgagtcggggggtaacagtcattagcaaaaaattgcggattaagcgtccaccacagaagcgagaaatataacgttttctattcactttcaaaaagtcatagaaaaagcacaaaatctacggttttacatagactttgcgctttttctggtgcgcctgcccggactcgaaccgggggcctcgggcttaggaggctcgcgctctatccaactgagctacagacgcatataaaattgtacgagtgagattgaacccggaactacccacctgtgtcccctaaggggggcgttctattccccacttaggaggcggtcgctctatcctgctgagctacaggcgcatatgaaattgtggaaaaactggcgcgcagatgctttgatattgtaccccaattccccgcgcctgtcaacggcaaggggtgtttttgtcccccgatttgggcgttttttttgcaaaatcagttgcgcgcgttactgttctacggtataatatgtggtcgagctttcaatgatatggacagatttcggaataaattgagaggtgcaccactttgcaagatacgaagctgagaaacgtcgccattatcgcccacgtcgaccacggcaagaccaccctggtggacgaaatgctcaagcagggcggcatctaccgcgagaaccaggccacggtggagcgcgtcatggactccaacgatctggagcgggagcgcggcatcaccattctggccaagaacaccgccgtccactacaaggacgtgaagatcaacatcgtggacacgccgggccacgccgattttggcggcgaggtggagcggatcctcaagatggtcaacggcgtcatcctgctggtggacgccgccgagggtcccatgccccagacccgttttgtgctgagcaaggcactggagctgggccacaaggtcatcgtggtggtcaacaaggtggaccgccccgaccagcgcatccacgaggtcatggacgaggtgctggagctgctgctggatctgaacgccaccgacgagcagtttgagtccccaaccctgttctgctccggccgccagggcaccgcctcctactcccccgacgtgcccggcaccgacctggtgcccctgtttgagaccatcctcaactatatccccgccccggaggcggacacggaggcccccttccagatgctggtctcctccattgactacaacgagtttgtgggccgcatcgccatcggccgcatcgagcggggcactgtaaagcagaaccaggagatcgcggtgtgcaacttccaccagcccgacgccgcgcctcagaaggccaaggccaccgccctctatcagtttgacggcctgggccgggtgccggtgaccgaggccaccgccggcaacatcatcgccatgagcggcatcggcgagatcaccattggcgacaccatctgcgcgcccgacgcggtggagcccatcgagttcgtgaagatctccgcccccaccatcgagatgaccttctccgtcaacgactcccccttcgcgggcaaagagggcaagttcgtcacctcccgtcagatccgggagcggctgttccgcgagaccatgaaggacgtgtccctgcgggtcaccgagaccgactccaccgacgccttcaacgtggcgggccggggcgagatgagcctgtccatcctcatcgagaccatgcgccgggagggctacgagttccaggtctcccccccccgcgtgctctaccaggagattgacggcaaaatgtgcgagccggtggagcgtctggtggtggacgtacccagcgacagcgtgggcgcggtcatcgagaagatcggcgcccgcaagggcgaccttctggagatgactccggtgggtgatcggatgaagctggagttcctggtgccctcccgcggcctgttcggctaccgcaacgagttccttaccgacaccaagggcgagggcatcatggcctcggtctttgactcctatgcccccatgaagggcgagatccagcgccgcaactccggttccctggtgtccttcgagaccggtgagagcgtcacctacggcctctacaacgcccaggagcgtggtgtgctgttcatcggcgcgggcgtgcccgtctatgccggcatggtggtgggcgagacccccaagcaggaggacatctcggttaacatctgcaaaaagaagcagttgaccaacatgcgcgcctccggctccgacgacgccctgcggctcaccccgccccgccagatgagcctggagcagtgtctggagttcctggccgacgacgagctgctggaggtcacccccgagtccctgcgcctgcgcaagcgcctgctggaccacgcggcccgcatgcgcgaggcctccaagaaaaagggctgattgccgcaacatgatttccgcccccggagcgtactccgggggcggttttttagtctgccggggaaacgactactccacgtagccgtgctttacctggtcggagatctcgcagagggccttgctggcctccatgtcaaactggcggcactgggccagatcccccagagagaccatccccaccaccttgcccccctccagcacggggaggcggcgcacctgcttggccgccatgagccgggtggcctccctggcgtcgtcgtcgggggacaccaccgcgcagttgcgggtcatgatgtccttcacctgggtcttgagggggtcctcctccgccgccacgcagcgcaggatgatgtcccggtcggtgacaatgccccgcaggccgccgtcctcaccgcagacgggcagggagcccacgttgtgccgggacaggagccgggccgccagggaggccgactcgctgggggtgatggagaccacgctggggttcataagatcgcgtacttgcatgacaaaaccgcctttctcccaaactttactgctagtttggacgggaaaggcggttttattcctctttcagcccgagattacgccgcaggggactggggccccgccaggcgaaggcccgacccccgtacttatcccggaacgtgcggttggtgagcccctcgagatcggagttttccagagcgtctaccagagatgtggaaaactcgggcagcggcgagcgggccggggcggcattgtagggacaggcccgctggcagaagtcacagccccaaatcaacgggtggaccctcagccgggcggtctcctcctccgtcagcgccccctttttctgggtcagctcggacagacagcgggacacgtccgcccccccttcccccagggccccggcgggacaggccgcccggcaggccccacagtcggggcagtccggcgcggcggggcgctccggcacgtccagcgccgccccggtgagaatggtacccagaaatacataggtgccgtagggcggcaggatcagcaggccgtttttcccccgcaggccgatgcctgccagccaggcggcctcccgctccggtaggggggagttgtcggcggcggggacaaacgaatcccctgggtatttccagcgcagggcatcacacaccgtattcagccgccgggtgaccacccggtggtagtcctccccccgggcgtagagggacaggttgcccggacgctccccggcgtagtagggaaaggccgctaccagcaccgtccgggggccggggcagaggttttccaccttctcccgggcggcggtggacaaaaacgggagcagccgccggaaggccacgccgccccaggcggcggccccggcggctgcgaaccacttatccagcattgtacttgtccagcgcccgccgggccagcgtcccgtccgggatgcagggctccgggccgttcttccgcttctgggcctcctcgcatcccttgcccgccagcaacaccaccgccgggcggcgggcgcccaggatggcggtctccaccgccgcctcccggttggggatcacggtgtaatccttgccgtgggcagtgaggaacacgccgatatcggcgcagatggcctccacctcctcggggccggggtcgtcctcggtgaggataatccggtcggcccactctccggcggcgttgcccatgccctcccggcggtcgatgcccttgccgccggtgcagccgaagaggacggtcagctcccggccggggtactccgcccggacggagcgcagggcgttctgtaggctcatgccgttgtgggagtagtccacaatcaccgaaatctccccgtcggcgctgacatagtgctccatgcggccgggcacgaaggcccgcaccagtccggcggccaccgcctcggcgggaatgccgtagacctccgccgccgccacggcggccagggcgttttccacattgaacaggcccggtgtggaaatggccagctcccgctcatagcggggggtacgcacatggaaggcgatcttctccccctctttgcgcacctgggagccgtacacgtcggcggaggggaacttctgggagaaggtcaccacccaggggcatgcggccgccgcggcgcgcacccgctccacatggtcgcagtccaggcagacgcaggcgctttgggcctgctggaagatcagcagcttggagttgaggtagtcctccagatcggggtgctccaccggggagatgtggtcctccccgatgttgaggaacaccgcgcaggccagctccaccccgatcacccggccgtacttgagggcctggctggacacctccatggtcagatagtccgcccccgccgacaccgcgttccagaggtggcgctggagatccagcggctccggcgtggtcagcttggcgggcctgcgctccaccccgtcgtcggtgacgatggtggacagcagggcgctctcccggtggccctgtccggccagccaggcatccacgatggacttgatataataggccgtggtggtcttgcccttggtgccggtgatgccggtgatccgcagcgccccggagggatggccgtaggcccggtcggccaagaggcccatggcctgccggatatcggtgacccggatgcagggcagggggacggcgggatactcccgctcgctgacataggcgaaggccccctgttccatagcggagcggaggtactcctccttaaatttgacccccttgcagacaaagagggtgttggggatgaccagcttggagtcacaggacaccagggacaccgggtgggtcaggccggcggccagaggggccgcgtccgccagcagtccatggcggagcaggagctgataatagtcccccaggggcagacgggttcggttggacatacggattcaccaccagtcaatcattttttggaaggccgaacgcgcgggccgatgtgggcatcggcccctacgggggcctgtggtgcaaaggcacaggggcggggctcgtctccgcccctactgtgtcgctcttgcggggcgtaaacataggggcgggtgcccacacccacccgctgctctcccctataccatgcgcagcttatagccgcaggcggtgatgcacctttccgccaggatttccatggcgtccaggtagtagtcaggcaggccgtggtaggtgcggtagacggacagctcggtacagcccaggatggccgcgtcgcagccggagccgcgcagccagcggtcgatggccgcaaacttctcccgggagcccttttcaccccgcttgatctcgtcgtaaataatgctcatgaccagcttctgcacgtcggcggggggcgtcacgccttccatgccccgggcggcgcactccctctggtagatgccggtctgaaccgtgccgtcggtggccaggatacccgcccgctttttcccgtccgccgccagcgcggccacggtctcccgaggcatgtggatgagggggatggcgatatccccctgaagccggtcggcaaagtagtgggaggtgttgcaggggatggccagggcggtgcagccgccccgctccagcagcctggccccgtccagcaggcggcggtagcagccctccacgtccccgcccaggatggcggcggtgcggtcgggcatggaggtatcgctccagatcagggtgggcaggtgctcctggtcgcaggaggcgtcggtacggtccagaatccgctggtagaagtcctgggtggcctggggccccatgccgcccagaataccaaggcgctgttcagacatacccgtccctcctgtcatgctgcggcatgggacccgacgccgcaagtgcggcgccccaagcgttttggccgaaggccaaaaccttgatgccggggcaattcatttgccccgagcagatgagatcaccggggtccccgcacggcgcaagccgggtggggcggcccatgccgcctaaaatgccgaggcgctgttctgtcattttactttctccatgcacgaggcataccagcccacgtagcggtgctggccccggaggatgcgcagcttgtgcatcaggccgttgtccggccggtagaacagggggttgaccgcggcattggcccgctccagggcgcgcatctcctggtggtaccggggattgacgtagtcgtaggccaccttgggggggatgacccaccacagatggcggttttgggtcatggtcagggcgcagggcttgtgctcgatgacgtcctccaccaggtacttggccaggttgtaccccgcgccggtgacgtagtagttgctgcggccctggcggcagttgatctcaaaggccttgaacttgccgtcccgctggtcgtacttgatgtcgaagttggaaaagcccacaaagccgatggcctccaggaagccccgcagcttttcgcacagctccggctcgggttcggtgatgatcaccgcgtggttgccgatggcgtggccggtgtgctcctccagcaggacgtggcccacgcacatgaggcgcaccttcccgtcggcgccggagtagttggtcaccacccgcataaagctgtcgtccccggggatgaagtcctggaggatcagcgcgtcctcataccccgctccgtagatctggtcgatgaccgtgtccacctcctccctggtctggaggatgtaggccttcttctgggtggggaaggggtgcttccagtaggtgtccgactcggcgggcttgaccacgaaggggccgtcaaagggcagctcgaacgcgtggcccatgcccttgtggtacaccaccgtggccgggtggtcgatgccgtaccggtcgcacagctcgtagaacttctccttgtggatcagcgtctccagcatgtccaggctcacatagggggcgatgacgttttccgggtagttgggcaggttggcggagatggcgttgaggtagttgtccccgcagcccagcaccagaatcttcctgtcgggaaactcacgggccacctcggtgacgttctccagcaccttgtccacccggtcgttgtgctcccgcacccggtagtcgatgatcctgctccccgcgcacacgctggcgggaaacatgccgtagacgatggtctttacgccgtaggcctcgtgaaaggcccgggccatgctgtacgcattgatgtcggagcccagcagaacgggcacaaactcaattgccataggtaaacgccccctggaacgtaatctcataccagctcccgcccatgggccgcacgtcggcgggataggcggcggccagctcctcggcctgctccgcgctcaggcgcagctcccgccggagccgctcgcccccggcgaagcactcggagagcagccggcccaggccgctgtcctcccgcatgttctctatcttagtcatattccattctccttaaaccgggcgggcggatgaaatccgcccctacggcctcgcagagtttccgcccgccagggcggaaatcaattcaaaatctgtgcggagcaggacatgcgcctgcgcagcacaccgatgcttgctccgccaccggcgggcaaccacccgcgcgggcgcgggtgaggggggtatcgcggtcattgtaccgccctttgggcggcgcggtgaccgcgtatctaggggggacaacgttccccctagaagcgtcctcagccgctggcccgtttcacctggtacacgccctggatctgtcccagcttgttgatcacgttggtcagctcctcctggtttttgacctccaggacgatgctgacggtggcgtagccgtccggcatggagcgggccgacagactggtggtcttgaccttggcggcggagagggtcatggccacgtccagggtcaggccgtcccggtccttggcggagatgtccagggcggtctggtaggaggccagctccccggtggcccagtccaccctgatccagcggcccggctcctccgcgcgcttggcgtcggaggcgttggggcagtcggcccggtggaccgacacgccgaagccccgggtgataaagcccaccaccgggtcgccgggcacgggggtgcagcacttggcgaacttgaccaggcagttgtcaatgccctccacgatgatgcccgactggctggtcttgcccccacggatggggacggtgggcgggttggaggtagaggggtgaatgggctcctgggcggcggccgactgctcggcgtggagccggtccaggcgggtcatctcgtccttgacccgcaccaccgccttctgggcggacatgccgccgtagccgatggcggcgtacagctcgtccagggtgccgaagcgcaccttcttgaggatgaaggggagcacgtcctcggcggtgatggcggccagggagaggcccacgtgcttgagctccgactcgaaggaggcgcggccggtggcgatgttctcctcccgccgctccttcttgaaccactggcggatcttgttgcgggcctcgttggacttgcagatcttcatccagtcccggctggggccgtgggccgacttggaggtgatgacctccacgatgtcgccgtttttcagcggggtgtcgaaggtgaccatgcggccgttgaccttggccccggtcatgtggttgcccacggcggagtggatgttgtaggcgaagtcgatgggggtggccccggcgggcaggttgatcacgtccccccggggggtgaagacgaacacctcgtcggcgaagagatccacccgcatggtgcgcacgaactcctcggcgtccacgtcctgctggctctccagcagcttgcgcacccactcgaaggcctcctcggtgcccagcttggcgttggccatgccctgcttgtacttccagtgggcggcgatgccgtactcggcggtgtggtgcatctcccaggtgcggatctgcacctcgaaggggatgccctcccggccgatgacggtggtgtggagggactggtagccgttgggcttgggggtggagatatagtccttgaaccggcccagcacggggttgaacaggtcgtggatgacgcccaggacattgtagcactcgggcatgtcgtcgacgatgacccggaaggcatagagatcgaagatctcgtccatggtcttgttctgggtatacatcttgcggtagatggagtagatatgcttcacccggccgtagatggtgcagcggatgccctcctcgtccagccggtcctggatgcgcttctggatgcccgccaggaactcctcgtgggcggaggagcgggcggccagctcgtcggcaatctccctgtagccgatgggatccaggtattgcagggaggtgtcctccagctcccacttgatgcgctgcatgcccaggcggtgggcgatgggcgcgtagatctccatggtttccagggccttctccttctgcttgcgggcgctctggtactccatggtgcgcatgttgtgcagccggtcgcagattttgatgaggatcacccggatgtccttggccatggccatgagcatcttgcgcaggttctccatctgctcctcttccttggaggtgtactgcacccgggtcagcttggtgaccccctccaccagatcggccaccgtgggtccgaagagcttggcgatctcctcgtgggtggcgccggtgtcctcgatgcagtcgtggagcagggcggcgatgatggagtcggtgtccagctccagctccgccacaatctccgccaccgccagggggtgggtgatatagggggagccgtccttgcgcagctgtccggcgtgggcgttgtcggcgtaggtgaacgcgcggaacaggcgctgggcatccagcgccgggttgtattccttgattttatcctccagcgcctgatagcgctccaggatggggtccataccagccacctcacgtaaagcaatcagaatgccagcgggcggcccggtcggctcacccgttggataatatatgccgcaatttccgcatgatacaggaatcgtccagattcaccttgccgtccacgctgcgcagggcgatgtgcaggtggtcggtggtgtgctccaggcggatgagcccccgctcgtcaaagacctccaggcacaccagggtgcgcatcaccgtctcccgccggccggcggagcgggcgatgctgcgggccaggcggtgggccgtggcctccagcggggcctgccccgcgtggcccttcaggtagcgccacagggtgacgaactcctcccggctgggcagcagggcctccgcctcctgccgggtgaggggctccccccggcggaacttctcgtacagggcccgctcggcctgggcccgggtgagggcggggcgcagatcgcagagctggagctggacgctccgccacccccggtactcgttgatctggggcgtgaaagccacgtccacccggtcgcccggccccacccctgcctcctcggcggtggccgagaagaaaatggcgtcgaacgaccggccggacgcggtcagcttcagcttcaggtgccgcccgccgcccacctcgttcacggcggaaaccaggcagccagacagggagaacaccggctttgggttgcccgcgccgtagggctccagcagctccaggccctccactccctccagggtgagcaggcccacatcgtccagctccccgtcgatgtccagggcggaaaccatctcctccccgccggtacaggcgcagacatagtcgttcatggcggcggcaaaggccgggatattctcctcccggatggtgaagcccgccgccagggcatggccgccgaagccctccagcaggggggcgcagcgctccagggcggcgaacaggttgaagcccgcgaaggagcggcaggagcccttgcccttgccgtcctgcaggcagatcataaacgccgggcaggagtacttctccgccagacgggaggccacgatgcccaccaccccctggtgccattgctccccggccagcaccagggcgtgcctctgcggccgggcctcggccatggcctggcactcggtatagatctccgcctcaatggcctgccgctcccggttgaggtcgcacagggcccgggagagttcctccccccgggccggatcgtccgtgagaagcagttccccagccagggaggcgcaccccatccgcccggaggcattgatgcggggggccagggtgtagccgatggccgtggcggtaaggggccgctcatccagccccgcctcgtggagcagggcccgcagcccaggccgcccggtgcggcgcagggcctccagccccaggcgcacaatggtgcggttctctcccgtcaggctcatgacatcggccaccgtgccgatggccgccagatcggcgtagcgctccagcagctcgtcccgccgggccgggccgcccagggccaacaccagcttgagggccacccccaccccggccaggcacttgaagggataggggcagtcggcccggcgggggtccaccaccgccgcggcggcgggcagggcggccttgcactcgtggtggtcggtgatcaccagctccacccccagggaggcggcgcaggccgcctcctccacggcggtgatgccgcagtccaccgtgacgatgaggcccaccccctggccccggagggcggccaccgcctcccggttgaggccgtagccctcctccatccggtcggggatataggggatcaccgtccccccctcccggcggaggaagtcggtgagcaggcaggtggaggtgatgccgtccacgtcgtagtcgccgtagaccgcgatgtgttcccccgccgccagcgcccggcgcacccgcgccgcggcccggtccatgtccttcatgagaaacgggtccaggagctggccccggccggcgtccagaaaggcgctggccttctccggggtgtccagcccgcgggcgcagagggtcagcgccgccaggggcggcacccccgccgcctccatggcggcccgcgcctgaggggcactggccgcccggttccactgcttgtatttcacggccgtatgcccccttccctcaaaattaccctttattatatcaaactctcagccttgtgacaaggcaagacgccgttcagcggcgattttttgccgccacccggcgcgcatggagcggacgcggccgcccctcagcccagctccagatagagcgccaccaggtcgatcgtcgccttcatcccctcaaagtgcgtccgccgccccacgggcctgcggcccgcggggaccccgtattcttttcttttatcgcccggcggaagtgaattccgccgggctccgcgccacccggcgcgcatggggcggacgcggccgcccctcagcccagctccagatagagcgccaccaggtcgatcgtcgccttcatcccctcaaagtgcgtccgctccatgccgtgggaggcgtggacgccggggccgatgagggcgccccgggcgtccatgcccgcgtgccaggccacggtgatgtcagaggagtagtgggggtagatgtccaccgcgtaggggatggcgttggcccgggccagctccaccaggcgggtgaccatgccatagtcgtaggggccgccgttgtccttggcgcagatggacacctggcgctcggtgcagctcagatcgtcccccacgcaacccatgtccaccgccagcagctcgtccacctggggcagggtggcccctccgtggcccacctcctcatggacggtgaagcacacctcggtatcgtaccggggccgctgcccggcgatgtgcatcagcctcagcagagtgagcagacaggctgcgctccctttgtcgtcgataaaccgggacttgaggaagccgctgtcggtgaccacggtcttggggtcgatacacacgaagtcaccgggggcgatgcccagggcctccacgccggcccggtcctccaccacctcgtcgatgcgcacggccaggttcttctcgtcccgcgggcgggtgagcacgtcgtcaaagacgtgggccgccggggacagagacaggatggttccggtgtatatccggccgtccctggtgtggatgcggcagtactccccgtccagggtgggcaggatgggcccgccgattctggtggtcatcagcatgccgtcggcggtgatggagcgcaccatgaggcccagggtgtcgatgtgggcgcacaggccgacgcgcttccccttttcccggccgggcaccgacaccaccaggtttcccttgttggtgcggcggacggcgtagccgtggtcccgggcgatctgctccgcctcccgcactacctggtccgtaaagccgctggggctgtcaatggacaaaagccgctgggcaatgttcatgagctgcccccggcatccctttgtatccagcatttgcatcgtctcctcgtttgtagtatgatataggatcataccataaccgacaggagcggacaactatggccgaagaaaagaccaatgtgatgcgtattttagaccaaaaaagggtgccttacactccacaccactacgcccaccccaacggcgcggtggacggggccagcgtggccgccctccttgaccgggaccccgcctcggtgtgcaagaccctggtgacccagggggccagccgccagcactacgtctttgtcatccctgtactccgctcgctggatctgaaggcggcggcccgggctgtgggagagaagtccatcgagatgatccctcaggccaggctgctccctctcaccggctacgtccacgggggctgctccccggtggggatgaaaaagccttttcccaccgtgctggacgggagcgtggaaggactggacgccatcgtggtcagcgccgggaaaatcggagcccaggtggagctggctccggcggccctctgcgccctggtgggtggaaccttcgcgccggtatccaaataatttttcctccagcgggaactttttctccgccttctcgtctaagaagcgtgcaaacccaaactgcaaaggagaatccaaatgaagaaactcggtacgcttgcccttaccctcaccctcaccggggccatggccctgcccgccctggccgcggaggagccggaactggtgatcgcccccgccgacaccggctacggccagaccatcgtgctcaatggagaaaccctggatctcaccggcatccccggcgtctccggggaggagctgctccccctgcgcctgctggccgaggccgaccacggctccgcctactgggatgaggagaacaacgagagctggttcaccttcggggacaaccgcatcaccgtcaagttcgccgacaacagtgtttggctggacgaccaacaggtgaaatccaccgcccaggtggcggacggcatcacctttgtagaggcgggcgttctgtccatgctggagggctacacggtagaccggaaccccgaactggatgtcaaccgcatcgacatcaccacccccaacaacgaccccatggtgaaggccgcctatcagatccgcgaggacagcggcatggccttcggcatgcggagcgacaacgcagaggtgacgaccctcttccagctgcccgaggacacctttgagcaggccatctgcttcacctccatgaacaccacccctgacatcatggtgctggccaagctggccgacggcgccgatgagaccgccgtgaaggaggccctggaggcccaccgccagtcccagcacgacaccttctcctggtacctggcccagaacctgcccaaggtggaggacgcccgcattctggtggaggacggctatgtgttctacctcatcgccgagaacgccgacgccggcgaggccgccttccacgcctatgtggaggcccaggcctaacctgtccgtccataacaagtgccccgccggctggcggggcacttgttttttggccggccgggccgtataatgttgcccaaaggaggaatcgtttatggaatctgccgctccccagactccggttcaggccctggaagcccttcagaacgcctacagccggttcctggacgcgcttccggaggcccgcagggccagcttgggggaggccatcggcttcttcctccgctcggacggcaatcccaagcttggcagtctggtggacgccttcgctgaagagctgcccgtccatgtggaggcactgaaaacccggcttgcggcctgcccggcggaggaggccgaccgcctggccacccaggccctggagctgatgctcctctatccccggcccaaagacggagccaccgagttctccctggccgcctttgagggctttgccgccccgctgctccccttcctggcccccgcccgccgggcggagctggcggagcgctaccgggcgctcaccccgccccggaagatgctgcctaaccagaaaaagctttggaaggccctgtccgggcgctgaagcccaagcacagccgccccccgcgcctctggcgcggggggcggcttatatgtctgttatgtccggagccgctccatgaactcctcgccggtgatcgtctccttctccaggaggtagccggccagctcccggagcttggactcgttctcccgcagcagtccgagagccttctggtgggccgcgcgtaccagctccaccacctggcggtcgactgcggcggccgtctcagccgagcaggacagggcggcgtcgccccccaggtactggttctgcaccgtctccagcgccaccatgtcgaactcctccgtcatgccgtagcgggtgatcatggcccgggccagcttggtggcctgctcgatgtcgttggaggcgccggtggtcatgttgtccgggccgaagatcagttcctcggcggcccggccgccggtgagggtggccagcttgttctccagctcggtgcggctcatgagcatcttctccccctcgtccacctgcatggtgtaccccagggcgccggaggtgcgggggatgatggtgatcttggtaacgggggcggagtgggactggagggcggccaccagggcatggcccacctcgtggtgggagacaatctgcttctcctggggggagatgaccgcgttcttccgctgggccccggcgatgacggtctccacgctctcctccaaatcggcctgggtgacggtcttccgccccaggcggacggcccgcagggcgccctcgttgacgatgttggccagctccgcgccggaggcgccggcggtggcccgggcgatggcgctccagtccacgtccccgtcaatatgaacccgctttccgtgcaccttcagaatggcgatgcgcccctggagatcgggcagttccaccggcacccgccggtcaaaccggcccgggcgcagcagggcagggtccagggactccggccggttggtggcggccagaaggacgacgcccttgctggagtcaaagccgtccatctcggccagcagctggttgagggtctgctcccgctcgtcgttgccgcccaggccgccggtgtcccgcttcttgccgatggcgtcgatctcgtcgatgaacacgatgcagggggccttctcccccgcctgcttgaacaggtcccgcaccttggccgcgcccatgcccacgaacatctccacaaattccgagccggagatggagaagaagggcaccttggcctccccggccactgccttggccagcagggtcttgccggtgcccggcggccccaccagcagcacgcccttgggcaggcgggcgccgatggcggcgtacttctccggcccgtggaggaagtccaccacctccatcaacgactccttggcctcgtcctggccggccacgtcggcaaaggatacgccggtggacgcctcctccacgtagaccttggcccccgacttgccgaaggtcatggcgttgcccatcccgccgggcaggccgcccatgcgcttcatcatccagcgggagagcagctccccaatgacgataaagatcacaatgggaagaatccagctcaccagaaaggagaggatgggattggcctgggtgggaatctccgcggtgaaggtgatcccctcctccgcctggagctgggccagcagccgctggccgtcatccggccagacgccggtcttgtaatagccctcccggccgccgtcgtccttcgcaatgaatacgatctcccggctcgtctcatccagggccacctgctccacctggccgccgtccaccatggtcaaaaactggctgtacggcacctccaccacctggcgctccagcagggacgggaagagaaacacgttcagcagcatcagcacaatcagcgccgccagatagtagaagatcagcggctttttggggggcgaagtctttatctcactgtccttcagttctttcaaatcaaaattcctccccggtttgaaacattattttgggtacgaaggaatcataggcgctctccctccaaaagtcaacgcgcccacggcgctatttacatattgtttacaaaagaggctccatccagccggacggagcctcttttgttcaatatttgttcaccataccggcaatcagcggggtgggcaccagccacatcaacaggaacaccagcaggttggcggcggacagggaggcgtaggagcatacaaaggtgaggtagaaggccagcagcagccccgccacagcacccaggcaggccagcactgcggcggtgcgcaccgcccggcgcagccgggccgcccccaccacggcctcggagtagggggctaccccctcccggcagaggacggcggtgaggatgtcgctgtggggctgctcctcgtcggacaactcccgccgccgttccaccgccgggaactccatcttgtccaccggcagcttgaagcgctggcgcagcatggcggggatcaggttgaagtcgcgggtggccatcaccggcgtgacccggttgcggatgaggctgttcagcgacggctccagcgccccgtggagcgtgtagttgagggcgaatatgcccgccagctccccgtcgatggcgcagaacaccgcgtttttcacgttgagcccctggggcagggtgatctccatcaggtgcatgaaggacgccgagcccaccagcacctgctggtcgcggatgacggcggacaggccgccctcatacacgcagaagtcggaggcgcggcggtacacgcacccctgggcgcggagcaggtcgtggaagagcttgtccagcccgcagcccgcgtcccggataagggtggcggtgtcggacaccaccttgtccaccggaaattccccaaagatcttgatgccgttgagggacacgcagcccggcgggaaaaagtcggtgtcgttgagcaggatgccgctgccgccggtggcagtgaccccgtcccacccggcgatggcggcccccgacttgctcagccgctgggtaaggctcagccacggcagggcgaagcacagcgccccggacagggaggcgcaggcggtgagcatggcggacaggcaccagagcagccgttccggcgcgccccggccgatggaggccaccacactgagcagaaggcacgcgatgaacagcagcgggcagacccggtggaagatccgctccgccccgtcggcggcctgcatctggcggccgaagccgatgggctcccccgaccacttggcgtaggtgtcccagccattccacttgccctcgtccagggtgaccagatagggttgggcggcggaggccgccgtgcggcaggccatgcgcagaccacgccgcttgcgcctggcgccccgcaggagaaagaatatccccagcacaatggccgcgcagtagggcatctgaccgtcccgggggtccagacggtacatggtcagcgcgtcggccagggtggccgcggcggcgaagaccagcagcgtgtccatgcccagctccagccgcagcagtcggaacagcccccgcatgagcacatccagccccagcagcatggctgccccctggatacccgccagggcaagcacccgcagctccggggtgagcacggccgggtaggggaacagccccagggtcaggtagagggcgggcagaagcagcaggaacaccagcaccgagcgtacccccatggacttgaggcccttgccgtaccgccgggccagctccgccgcgggcagatccggggcggggggcggctggcggcgggggcggcgctcccggaagacctcctccggctcctcctcgtcggtgccggggatgtactcctccgcccggcgcacctcctcgtcgtcctccttgccctcctcctcaaacatgtgtccggcgtagtcgtccgccttctgaaacaggcggttgagaccctcggcaatggggttgtccgatgccggcccttcctcaccggggaactccaacaccttgtccccgtcctccggcggctcctccggctccggttgaggcggcggagcggggggtggagcctcccgccggcccgccgggaaagacaccaccttgcccggcccgggcggcccggcgggagacggcgccgtgcgctgggaacggggcgtcaccggaaaggggatggtgtcctccttccaccgcggcttggccgcgccgccgccgaactccgccagaatctcctccagggagaacgtctcctcgccgggcatacctgtattccgttcgtcgtcccggtccttggacatggttctcacctgctttgcataatttggatgcgcgggcggccatagaggccgccgcctttccgtcccgcttattccattctctgccgcacggcctcatagagcaggatggccgccgccgcggaggcgttgagggagttgagcttcccccgcatgggtatgcgcaccttgaagtcgcaggtctcggccacaaggcggcccatgccgtccccctcgctgccgatgacgatggcggccgggcccttcaaatccgcgtcgtacaggagccggtccccgtcggcggcggtgccgaacacccacacgcccgcctccttgagctccttgagcagggcgggcaggttggccacccgggccacgggcacgtggctcaccgccccggcggaggtcttggccaccacggcggtcaggccggcggagcggcgtttgggaatgatgacgccgtgagcccccgcgcactcggcggtgcggatcaccgcccccaggttgtgggggtcgctcagctcgtcgcacaccacgatcagggggggctcccccttggcccgggcggcctccaggatgtcgtccacgctggcgtactcccgcaccgccgctagggcgatcaccccctggtgggagtgggtgcggctcatgccgtccagcttgcgccggtcgcactccaccaccacaacgcccttggagcgggcggtggaggcgatgtgccccagggccgcgtcggtctccccccgggccagatagatcttgtcgataggggtgcccgcccgcagggcctccgtcacggcgttgcggccctcgatgatgccgtcggcctccccgctgggggccggtctgcgctccttcatggtctgtcctgcctttctcattggtccgatactggacaacagtataccacaagacggcggatcaaaaaagccaaaattgccgcattcctgcaaaaagagcggtgggcctccccccttgtttttcatagaaagtttacaggtttcgccgcgccgttccttgttttttcaaactccttgtgctataactataattactttgaatattgaatgtttcccatcaaggaggaacgagacttgaactccaatcagaacaacaaccggggcaagggcggcggcaacaagcgcaatatgacggccatcgtctctatcctgctgtgggccctggttctcaccctgctggtcaacctggccacgtccaggctacagcaggccaattccgtggaggtgtcctacggccagttccgccagctaatcatgcaggatgccgtggagtccgtggttatgtcaagcggcaagtacaccttcacgctgaaggagggctactctctctctgtcggcgaggacggagaggtgaccgtccgcacgccggaggagggcgggcaggacagtcaggccgctcagacgccccaggagagcgggaccaccggcggagtgctggacctgcccctgttggacgggacagccccccagcagcagccggtccagagccagaatcaggcccagagcgccggcggcagggaatccctggtctacttctgcgcccccatcacccaggcaagcatccgggacgatgatcttgtctctctgctggaggagcacggcgtcaccaacttcggccccgaatatgtggagcccatcaaccccattctgtcggtgctgctgtcctgggtgctgcccatggtgctcattatggtggtcttctccctgctgatgcgtgggatggccggcaagatgggcggcggcatcggcaacctgggcaaatccaacgccaaggtctacgtggagcgcaagaccggcgtcaccttcaaggatgtggccggccaggatgaggccaaggagtccctggtggagatcatcgacttcctccacaacccccagaagtatacggaaatcggcgccaagctgcctaagggcgcgctgctggtgggcccgccgggcaccggcaagaccctgctggccaaggccgtggccggagaggccaacgtgcccttcttctccatctccggctccgacttcgtggagatgttcgtgggtatgggcgccgcccgcgtccgcgacctgttcaaggaggccaacaagatggccccctgcatcgtgttcatcgacgagatcgacaccatcggcaagtcccgcgacaaccgcatgggcggcaacgacgagcgggagcagaccctcaaccagcttctggccgagatggacggctttgaccctaccaagggcgtcatcctgctggccgccaccaaccggcccgaggtgctggaccaggccctgctccgccccggccgcttcgaccggcgcatcatcgtggaccggcccaacctggccggccgtctggccaccctccaggtgcacacccgcaatatccgtctggccgaggacgtgaacctccgcaagatcgccatcgccaccgcgggcaccgtgggcgccgacctggccaacctggtcaacgaggccgccctgcgggctgtccgcctgggccgcaaggcggtcaaccaggaggatctgctggccgccttcgagctggtcatcgccggcgcggagaagaagggcagcgtcctcagcgagtttgagaagaagctggtggcctaccacgaggtgggccacgccatggtggcctacaggcagaagcacgccgagccggtgagcaagatcaccatcgtcccccatacccagggcgcccttggctatacgctccacctgccggaggaggacaagcacctgcacaccagagatgagctgctggcccagatcaccgtctccatgggcggccgcgtggcggaggagctggtactgcacaccatgaccaacggcgcggcccaggatatccaggacgccaccggcatcgcccgcaacatggtggccatgttcggcatgagcgacgagttcggcatgatggccctggcctcccgccgcagccagtacctggacggcggctacggcatcgactgcgcccaggacaccgccgccgccatggaccgggcggtgcgggatctcatcgacgcctgctacaagaaggcagtggagatcctctcccacagccgggaggacatggacaaggtggtggagtacctgctggagaaggagaccatcaccggcgcggagatggtggctattctggagggccgcgaccctgccctggcggacaacttccccgacccggacgggaaaggaacggtcgggcccccggcagagcccgtctccgaccccatccccctgagcggcggcgagccccagccccccaacggcggcggcatggagttcggccccgagggcaagcccaaggaataagcaaaaaggaacccccgcgagtccgcgggggttcctttttgtgcccggtcatgggaacgccgcccactccaggccggaggggccatctgaaaaggccgccccctccacttggcgggtacaggtccggcccagactgtccaccgcctccaccagcaggagcacctcgtcccctgcctccactcgggtttgacgctggaaatctgatacatcggcctccaggcggccgtgctccaccggaagggactgttcccactccggcgcgccgttccggtactggcgaaggacggcgcgctctactgtcactaaggagccctcggggggcacacaggccgcccaaatactcccgtcccaggtccatatcccgccggacagggttccgcccttccccttccgcgccgtcagctccagcggggccagggcttcggcggtcacggtccactctcccagctcctgccggtactccgcgccggagggagtgcgcgtccgcagcgtgaaatggtactcctcacccagaggaaggcgcagctccgcctcataggccaggccgtcccggtcggcccgggcggtgaatcgctctccgcccccctccgccgtcaccgacaggcccaaccccggcgcctccacctcggggacggcccggagccgccagcaaaaggtgccgtcctcccccagggcggcgactccccgctcctccacctgccacatccggccgtccgccagggcggcggccaaaagccggtcggcctggccgctttgaagggtgttcacccttaggaccagcacgacgcataccgcgcccagcgccgccgacagcaggggccacagccgccttttccacctgggtacgggccggggcggttcggcggccgccgcctcctctacccccagcagcacccctaccgggaggtgaaacaggcggctcagggccaccagcttgtccacctccggcaccgcgccgtcggcctcccatttggagatggcctgccgggtgacgcccagcgcctcccccaggccctcctgggacaggcccagccgcttccgctccgcctgaatatgctgcccaagggtcacaggccccccctcccctctctgcctcccagtatagccgaacaggagcccctttggcaaccaagccgccgtttccttttgtcaaccgccggttgcccctccgctctccgggtcaaagaaggccgccagccggtcttgcccgccgaacaggttgttgtactggaggcgctggtagtcctcaatccgggcggtgaaatcgttggtctccagatggctgtaggcccggcccgccgcgtccgtatagcccacgaaggtgagggcgggcagctcctcctggagctgccacaggaagtccccgtagggggtgcccgcaatgcccgcgtaccgcaggaggtactggcccaggaagttgaggctggtcgtctccggccccgtcccgggcaggggatagttggcccagatgacaaagggcacatagtatttgcccatatactgctccatagtcatctgctcctgggtgacgccgtaggccagatcgaggaagccctgctccaccgagggctggtgatccccgaacataatcacgatggtgggctcgtcaaagacccggagatactccaccagggcgcggaaggccgcgtcggtcttgcccgccagggtgaggtactgctccgccatggggtactcccccggcgcgtcggctacggtgacctgcgccgggtagtccggcacggtatagccgccgtggttctggatggtgacgttgaacaggaacagaggcttcccctcctccttgtgctcaagctcccagataatctgttcaaagtcggactggtcgctgacgtagccgtgctcgaaggtctggggcacatccatgtcgtcgccgcacttgtaggagtcgaagcccagccgggggtaggcccgatctcgctgccacgaggcccgctccccagggtggaaggccagggtggaatagccctccgccttcagaatggaggccagggaggcggtgggccccagcacatactgctggtaggggatgctgcccgagggcaggaaggccatggagttgccggtgaggaactcgaactcgctggcgctggtgcccgcgccgaacaccgaggtgtaggcgtggccatacaccgcgttgtccagggagcggatgtagttggtgacgctggcgctgagggtcaggtttccgtagtcctcaaagtcggcccaggactcgttcatgatggccacaatattgggccgctccacggaaaccgccgccggctccggcggctccacgccggccatgatctgttccagccgctccggcgtgacgtcctccggctcctccacctcgaggaactccgtgttgcggaggaataccgccaggcagccgccagcacggtaggagccggcggggtcccacacatcggtcttgacgccgaaacgctccagccgcccggtggggaacaggagcaggaggcaggccagccccgcccccaggcacaccagccgcaggggccgccgcgttccggtgaggcgcaggcgggccttgtgtttctccggatggaggaacacaaccagggccgccgccagggcgacggccgccagcatctgccacgtgggcgtaaagcggtagctccccgccacatcggcggcggtgcccagggcggagagatcccagggcaggatgggggtgccccggaaggactggacaaagcagttggccgcgccccacgcaccggaggcgatgtggatgccgatacagcagggggcgatgcgcccggtcaggccgcacagaggccagtacagcagggcgatgcacagggcgttggccagcagcgccggaaagggcatggcccagggcaggacgccgtaggtgaactgcatgagccaggcggcggtgagtggggtcagcagcaggaagcccgcctgccacaaggtgtcggttggaatcgaaatgcttcgtttcatggggtattctcctgaatctaagggtatagtctgtgattataccgcagaatttcccctctgtcaaaaaaggacggacggcgccgaaccggcgcacgtccgtccttttgctgctttacgtctcctccggcgcccctgtgcggccgccgaaggcctcgatggctcgctcgtcggcctcccgcttctcttcaatggcctctttcagtaacatgtccttgaccttcatgaggcggatggtgttggcgcgctcgttctcgtccagcttcatggtgatatactggatggcctcctccatttgggggatctttacatactccagggcgttgacccggcggcgggtcttctcgatctcctcggccaggagctgggaggtcttttcgatctccgccaggcggagcatatcctggagcacgccggacagggcctccacagcgccgtccagttcgccggaggtggtggcgaagccgtaggggtagatttccccggcgtcgtcgctcttggtcttgaagtggtacaccggcacattgacgctcatgatgttctggaaggtcatgtccagctccacgctctgcttggggtagagcagggcctgctccagcatctcggtggacatgagggcggaggccacggtgaaggagccgtgggcgcgcatcagcccctcctccaccctcttccgcagggcccggttctcccgcaccacgtccatgaactgcttcatgagctcgtcgcgcttgtccttgagcagcttgtggccccggatggaggttctcagccgggttttcagccgcgtcagctcctgccgggtgggattcacgttaatcgcgggcatggattacccctcctctccttgcgccaccgtcagccttcagaggggccccgccgcgcggggacggcgcttttgcgccgcaaaagcgccgcaggcgatttccgcagggcggattcattccgcccgagaatgggaaatccaggggcccccatgcggccggccgcatggggttcacgttaatcgcgggcatggattacccctcctttttcgggaggtacttctcaatgaactccggcttgatgcgcttgagctccgccttgggcaggatgctcagcagctcccagcccagatccagagtctcctcgatggagcggttctcgtcgctgccctgggccacgtagcgcttttcgaactcgtcagcgaacttggcgtactggaggtcggtgggggacagggcggcctcgcccaggatgctcatgagctccttgttctccttgccggtggaataggcggcaaagagctggttcatggtgcccgcgtggtcctccctcgtcttgccggggcccacgcccttgtccttcaggcgggacagggagggcagcacgtccaccggcgggatgacgcccttgcggtagagctcccgggagaggatgatctgcccctcggtgatatagccggtcagatcggggatggggtgggtcttgtcgtcctcgggcatggtgaggatggggatgagggtgatggagccgctcttgcccagctgccgccccgcccgctcatagagggtggccaggttggtgtagaggtagccggggtagccccggcggccgggcacctccttcttggcggcggacacctcgcgcagggcctcggcgtagttggtgatgtcggtcatgatgaccagcacgtgcatgcccttctcgaaggccaggtactcggcggcggtgagggccatgcggggggtggcgatgcgctccaccgccgggtcgttggccaggtttgtgaagagcaccgtccggtcgatggcgccggtgcggcggaactcctgtacgaagaagtcggactcctcgaaggtgatgccgatggcggcaaagaccacggcgaagttgcccgcgtcgtcccccagcacacgggcctgccgggcgatctgggcggccagggccgcgtggggcaggccggagccggagaagatgggcagcttctggccgcgcaccagggtattcaggccgtcgatggtggagatgcccgtctggatgaactcgttggggtagtcccgggcggcggggttcatgggcaggccgttgatgtcccggtactcctcggccagaatctccgggccgccgtcgatgggcttgcccatgccgttgaacacccggcccagcatgtcgccggacacgcccagctggagggggtggcccaggaagcgcaccttggactcggccaggttgatgcccgcggaggactcaaagagctgaaccacggcgttgtcgccgttgacctccagcacctggcagcggcgcacggtgccgtcgggcagctcaatctcccccagctcgtcgtaggtgacgccggacacccggcgcaccaccatcagggggccgttgacctcctgtatggtacggtattccttgatcattcctcagcacctccccgggcggcgatgtccgcgatctgctcctccatctcccgggccatgtcggcgtagacggcggcgtaccggtcgtccggcacgctcttggcccggcccatctgctcccggaaggggatggcgaacagctcggcggtggcggcgcccttctcaatggcggcgcggcacagcttgtcgtagtccagaatcatctggatcatcttgtcctggcgctcgtagctggagtaccagtccacctccataaagccgttctgctggaggaaatcctcccgcagcatcttggcggtctccagggtgagctggtcggcggcggacagggagtccttgcccaccagctgcacaatctcgttgaggctggcctcctcctgaaggatggacatggccttgtcgcggttcaccatgaactggggccccaggtgctcgtcataccagggcttgagggagtccaggtacagggagtaggagttgagccagttgatggccgggaagtggcgcttgtaggccagggaggcgtccagggcccagaacaccttgacgatgcgcatggtggcctggctgaccggctcggacaggtcgccgccggggggcgacaccgcgcccaccgcggtcagggagccccggcggtgctcgtcggagccgatgcactccaccatgcccgcccgctcatagaactgggccaggcgggaggacaggtaggccggatagccctcctcgccgggcatctcctccaggcggccggacatctcgcgcagggcctcggcccagcgggaggtggagtcggcgatgaccgccacgtcgtaccccatgtcacggaagtactcggcgatggtgatgccggtatagatggaggcctcacgggcggccaccggcatgtcggaggtgttggcgatcagaaccgtccgcttcatcagggactcgccggtgcgggggtccaccagctcggggaactcccgcagcacgtcggtcatctcgttgccccgttcgccgcagccgatgtagaccacgatgtccacgtccgaccacttggccagctggtgctgcatcaccgtcttgcccgagccgaagggcccggggatggcggcggtgccgccctttgccacagggaacatggcgtccacgatgcgctggccggagagcagcggggttctggggggatacttgtgcttgtagggccgccccacgcggacgggccacttctgcaccatggtcagcgcgtgcttctcccccttcccgtccaccagcaccgccaccgtgtccagcaccgtgaaggaaccggactggatggactcgatggtgccggacagggtggggggcaccatgatcttgtggagcaccacgctggtctcctggacggtgcccagcacgtcgcctccggtgaccctgtcgccgggcttggccacggcggtgaagtcccacttcttctcccgatccagggcgggcacctccacgccccggggcaggttgttgttccccgccttccgcatgatgccctccagggggcgctggatgccgtcgtagatgttctcaatgatgccggggcccagctccacgctcatgggcgcgccggtggtctccaccaccgcgccggggcccaggccggaggtctcctcgtacacctggatggacgccgcatcgccgttcatgttcagaatctcgccgatcaggcgctgctcgcccacccgcaccacgtcggccatgttggcgtccttcagccccgtcgccaccaccagcgggccggagaccttgacaatttttccgctcaatgcttcaaccttctttctcgtcggcgcaaactgcacatccttcgcgtccccgtaaacgggaacgctcactcgttccgttgcgcctcctcctccccgccggacccacttcgttgggctccgccgggggtccggacggccataaaggccgcccctaccgcagggcgttccggacgtaggggcgaccttcatggtcgcccgtccttccggccattgccgatgatccgctccctcggcctgctccgtcttcggcgcgggcgggtgtgggcacccgcccctacagggcgcccaacgcgttatgggcgtagggggcgatgcccacatcgccccgccccctctccgcagggggagctacaaaatatccgccccaacagcacgctccacggcccgcttgacgttggccataccgatgcccagggagccgtccttgccggggatcaggatgatggcgggggtcagcgcgtccttgtaccgctccagctccgcctccatgtgggccgcgtacccctcggtcaggtacaccaccgcgtagttctccttcgccagagcgtgaagggtgcgctttgcctcttccgcgctctccgccgggaacacgtccagccccagggccttgaagcccagcacgctgtccttgtcgcccagcaccgcgattttatagttagacataggcctcacgcagcctttcccgaatagtgtccgcgtccagcccggccatacggccggagaggatggtgcggatggcggtgaactccgcctcccgggcgtacagatagcctaccaccgcctgctccccgaaggggatgcggcgggcctgggccaggtagcccatcaccgcgtcgtcgcacagccgctcaaaggcggtgagctccccgctgccgggagcggtgagggccgcgccggccgccgccgcatcactgaggggaccggcccggaacaccgccgccagatcattgcccttgcctgacgtgagcacgtggacctccacatttcccccgggcaggagcacctggctcaaaaagtcgctccccttccccatccgggcgcaccggacggcggagcgcaggttggcggcgtcgatgagcagccgtacatacccctccaggaaggggctgcccaccgcgcgggccgtctccgccatctctgcaaaataggcccggtccagcacaaagtcggccagttgagggtcatttccaccattgagggtctcccgggcctgcacaaccgcccggcggaaggggtcggtgaactcccgcaggctgtcccgctgaaaggcctccttcacctgggcggcgctccaccgcccgccctccatcagcagccggtcggcgtccgcccccaccgcggccccctttaccagggccttggcgttgtggtagtcgtacttcatctgaaacagctccaccagccgtttgtcgggcaccgcgccgcccagctcccggtacagggccgcccgcgccgccgagagcagctcgtccagcccacggttggtcagggccggcagctcctcatagccgcactcggccagcaccttcaccgcctcgtcgtcgctgcgggcctccaccatccgctccatccgctcccgggtcaccaggcggttctccatcgcccgcacgcgggctgagatggtcaaataatccgtgtctctgatcttactcaagttttcgcctccctatcggagcgctcagccaaagagcacctccacaaccgtccggtccatctcgccccgcaggaggcgcaccagtgtttcaaaggtgcagttcacttccacgtccccgtcgctgagaatcagcccgccccggatgggccgggtctggacagacagggtcaaatggccgtcccccagcctctcgttggcctgggtgaccacctgcttgccatagcgcgcccggtccttctgggacagaatgacctcctcccgtcccgtggacgacgcctccgccgccagccccgccagcagccctacgtattccccgtccggcaggcttgtcagccgctccatggccctgtcgtaggccttggccagcatctcctgcttggcggccagctccagcttgcgggcatccaactgggccacgctggcaagccgcgcctggcgctcctccgcactgcggcggccgcgggccgcgatctcctccgcctcccgcttggcctgagcctcgtagcgggcggtgatctcgtcggcctgccgccgggcctcggcccggatggcggcgatctccgcctcggtgtcggccgcaatgcgcccggtgattttctcaattccgtccatagccgcctccgctcagaagccgaacatgatcatcaggaaggagatgagcagggacaggatggcgtagaactccacgatgatacacagtaccatgcccttggaccagtcgttggggttcttggccacaatgttgaccgaagcggcggccacccggccctgggcgatgccggagagcaggccgccgatggccatgggcaggcaggcggccagaatcagcaggccgttggcgatggacagctcggccacggtgccgtcgaacaggcccattttcatcagggccaaaaagccgatgaccagcccgtacaggccctgggtgccggggataacctgcaggatcatacacttggagaactgggaggggtcctcggccagcaggccggcgcccgcctcaccggcgatgccggtgcccttggcggagcccacacaggccaggccggcggccagcgccgcgcccaggaagccaaagaacgcacccgcgtactgggtcagaaattcaccgatcgtcatgttactgttcctccttaatatcgacaaacttggtcgcaatgttcaggggccgccaggggcgtccgccctccttgtagaactgcttgaagaactccagatattgcaggcgggacgtgtgcacgtaggtgccgatcacgttcaggccgatgttgaaggcgtggcccacaataaaaatcacgaagaagatgggaatccccaccgccgggggcaggccgccgccgggcatggcgcccaggatgttgaacacctgcccgatcaccgagccggccagcatcatgaccatcaggcgggagtaggagaggatgtccccaaagtaccccgtcacgccgttgtagaccgcgccgatcaccgccgtcaccttgccgaagcccttggcgctgcggccctgggccagcagcatcaggcagcccagcaccagcaccacagggatgccggccacgctgcctacggaggaaacgccggtcaggttcagggcaaacagcccgatgcccgcaaagatcacccaccaggtgccgacgtcccacacggcatcccacacctggccgtcccggcagagcatccagaacttgaccgccatgcccaccacaatctgcacgaagcctaccgccagagcgaataccagcacggtcatggggtcctccatcacgttgagcagaggggcgggcaggccgctgccctccggcacggagaggaaggggacggccggctggggcaggcccagcatgccggtgaactgcaccagaaagtcggagaaaaatccgccggtcagcagcccgatcaccgccgacgagacgccgcacatggtcatcagccggatgagctggccgaagccgcccttgggccgcaccttatgctggatgaacaggcaggcgcccgccagaagcaggccgtagcccagatccgcaaacatgaagccgaagaagaagatatagaacggggccatcaggccgttgggatccaccccgtcgtaggcgggcagggagtacatctccgtgatggtggtcagcggctcggtgatggcgttgctcttaagcttgacgggcaccaccgggtagtcctccggcgccgggtcggacgtctcccagcagcaggtgaactcccccagcttccgcagcagcttctcctcctcgggcacgggcacccacccgtccaggtagaaagccgtcccggagtccagcaggcggctcttggcctcctcccgggcgatctcctggaccgcccggtccaggcacagctccagcgccgcccgcctgggggcgaagccggccgccgcggcaatggcctcctccagtgtacgggcggcctccgcctgcccggcctccagccgtttgtcgttctcggccgccgttccggtccagccccgcagggccgcccgggagaagccgtactccttgagcacctcctggcaggcctcctccgcgctgcggtggcagaggaacaccaggtattgcagctgcgtgtctgccccggcccggagcacctgggtcagctcacttttctccgccagctcccgctccagcgcgtccagatcggcggaggcggccacggtgccgaaggacaccgccacctccggggtggaggccgtctccagcgggatgtccagcgccagccagggcgccagagccagccgctgggtgcgcagcttgttctgctcggcatagagggcggtgatccgccgctccagctcccccagccgcccggcgtccgccaggccggcctcataagccgcgtcgtcaaagagctcctcctctgtgaccaccggccggggcttgagcagcccgcccttctgcttggggccgtatttttttaaggtcctgagcgccccctccacacgggaccgcgcgtcccgggccgcgttcagcgccccggggtccggccgcgtcagggcagcccactccgggtcgtcccccagatggggcggctcgtcaatctccacacagcccatgtgctgaagcagccgcagcaggctctcccgctcggcctgcatgccgataagccgcagccgcttcattttaacaatggacattcgttttcactacccttctcacgatgctctcagcggcgtccgccaggcgggcctccgcctgggcccgcagggcgtcgcaggattttcgggtctgggccatcacctccgacgcgtgttcggccgccttggcctcggcctgccgcatcagctccctcgcctgggcctctgcctgggcgcgggcctccgccaagcgggccttccccgcccgttccgcctcggccaccagccgtttggcctccgcctgggcctccgccctgcgggcccggttggcctcctcggcctcggtcacctgcttcattgcttccagagacatgctctcaccgcctttctctatcatccgggtcgcccgaaacaaattttcccgatgatatatgaatgatacttcaaatcggagagaatttcaagtttaaaattataagtttactttttaacataattcgttttccttctgcctcttccgctgggagccgacgaaaaaagcggacgcatagggctatgcgtccgcttttgggcattattcgcctgtcatggccagcacggcccagtcctcccgggcctgccccgcctgctccagcacgggcaccaccggggtctggttcagccggggcagggtctccccctcccccaggcgcaccaatacgcggtcggcgcgctccagcagagcggcggtctggccgctctccaccgccccgcctgcggcggcggaggcggtggtcaccagggacacctttacctccgggaactccgccagtccggcgcgcacctcctcgagaaagacctccagcgcggcggtccggccgtcagcgggatagttggcatcggccttaatccaccccagttccccgtcggtggggaaggcccagttgtccagcaggatctcatcaaagcccagggccgccaactcccggcacacgcccaccacatattggcgggcgctctcattggccgggctgagccagcgggtatcgccgctgtcccgccagttgcccgcgttggtgtggatggccagagacatgtcgctgcggggcacaaggttgtcccggaagcaggacacccgggccacggtatacacctctccgccgttgaggagctggatggccgcgttgagggccgggtcggcggcggatgcctccgcctggatggccagggccagcctggagatatagcccaggctgccgtcgtccgccttcatgtcaaagagagcggcggtggcgccggccgcctccacctgctgggcggcggtgccgtcatagagggcggaattgggtagcagaatcccccggaagtcctcctccggttccggtgtgggtgtgggctccggcgtggtcaccaccaccggggcgcccgtagcaggcgccggctccttctgctggaaaaagggcagattgattttaatgccgttggcagagtagtcgatgtagggctcgagccacagcagagcacccaccgccaccgccagcacgaccagcagcaggacaatcagcactttcaaaaaggtgcggacgcggctgcgtccgtggtaggaatcgtatccgttgcgcctcaccggcgtcccccctcttcgcggcattcacccggccacgcctgaatagcttggccgttttttgcccgttctatcacggtccggactgctctgtcccagcctgaagcagcgcgtcgtccagcttctggaaagcggcggcgatcatggcccggtcctcctggctcatgccgctgagcagggagctgaaatatccgctcacgtcagtggccgccttggcccgcagggcgttgtacttctccgtagcgcagacatagatcacccgccggtccgtctcgctgcgctgccgtctggccagccccagcttttccagccggtccacaatgcccgacaccgtgctgttggcgcttccggtgcgctcggccagggcgctgatgggtaccggcccatcctcccccagcaccgtgagcaccagggcctggggaaaggtcaggtccagccggccgaagtggctgcggaactgctgggacatgtgctgtgtcacccgcagataggacatgaaaatattgggctgttccatcggtcaatactccctcctgtcacgcgcatccacagaaccgcctcagcccatggcctgggtggtaaggcgctggagaatcacggccagttgggcgcgggtagccacgccgccgggcagcagtctgccgccgtccccctccagccagcccatgcccaccgcgtggcgcatgctctccaccgcccagacgccggtcatgttggcgtcggagtacaggttgagggagccctcggccagcggcacgccccggtattggtcaaagcgggtgaggaaggccgccagctcctggcgtgtgacggattgatccggcttgaagtccccccggctgtcgccgttggcaattccgttctccttggcccaggccaccggctgggcataccacgccccgggggacacgtccccaaaggagacggtggccgtgggggccggcgaaccctccatccgccacagcacggtcactaccgtggcccgggtcacgttggcggtaggggcaaactggctctcgctcacgccggtcatatagcccttttcggtcacctcattgaccgccgactcataccacgccccgccgggcacatctgtatacccgcccgcggctgccgcgggcagggtcaggctggcacacagacacagggtacaggccagcgccgtccatcgctttttcaaggcattcactcccaatcttgttaggctgtccccattctacgacatggattttacaaatgtgtgaacaaccgctgaataaaacgcccgccgccctgcaaaaacgcccccacagccgggcgcacagcgaaagaggggcgggcgccgcagcgcccgccccagcctgtcgaaaaggtattttcgacaggctgctggactttttgaaactttaaaaaagtttcaaaaagtcgtttgatccaacgcgaaagggaaccctgacggttccctttcacactattcttccctccgaacacctcggcagaaaggcttaatggcaaccccaggcgggcgccgcagcgcccgcccctcttctgcattcacaccgccagcgcccagttaagcatcaacaggagcccaaagccgggcacgcccagcacgcccagcaccagggcgttgaccagattgacccccaggtggagacccaccaggccgcccacaccgctcagcgcccacagggcggccaggcccacgcccgtccgcgcggccagccgcaccagccactccagcggccgccgcagggccgccaacagcaaaatcaggatcaacccgcccacaatccagggcagggcattgagcaaggtttccaccgccattccctcccagctttcctctgccagtcccttggcggcgggttccccccgcagttatcccggctgcgcctgcgcctccccgtccagctccttgacccgccgcagcaggtaggagtaccgggcctggagggcattgatctcaaagacataggactcgatcagatccgggtccttggcggcgttaaagcccgcataggcctgggcaatgaggctgcgggtctgtcccagcccctccaacagcgcccgccgctcggtatcctccgcccgctcccgtcttttccgcaggaaaaacactctggcctcctccgccataacggcgcctcctttgtttttggtttcccatctcatggtatgtccagtctggacaaatatgccggagcctaaaccaaaattttccgcgtatggcgctccgtcctgtgcacatactatgcccggacaggaaagaggcctgttcctccttgcatctccttttaagccggtgccgggtgagctcaccctctggcgaaaggcgaaaggaagcgcaagctgtccaaacaaagccgcccgccccgcgacgaagcggggtcaggcgcagaaaggccgccggacaatgtccggcggcctttcgcgttttcttgacactttgggccggtttggagtaatataataagatgtaattttctgattttggaacgagcgaggagaggcccatggcgaaaagcaattcccccaaaaattacggaaacgactccatttcctccctgaagggggccgaccgggtacgcaagcgcccggcggtgatcttcggctccgacgggctggagggctgtgagcacgcggtctttgagatcctgtccaacgccatcgacgaggcccgggagggccacggctccctgatcaccgtcacccggtatgaggatcactccatcgaggtggaggacttcggccggggctgcccggtggactggaacgagaaggagcagaagttcaactgggagctggtgttctgcgagctgtacgccggcggcaagtacaacaacaacgacggcgataactacgagtactccctgggcctcaacggcctgggctcctgcgccacccagtacgccagcgcgtactttgacgcggtgatccaccgggacggctttgagtacaccctccacttcgagaagggcgagaacgtgggcggcctgaaaaaggagccctactccggcaaaaagaccggctcccgcttccgctggaagccggatctggatgtgtttaccgacatcaatatccccgtggagtactacaccgacgtgctcaagcgccaggcggtggtcaacgccggggtcaccttccgcttccgcaaccaggtgggggggaagttcgagaccaccgacttccagtacgaaaacggcattgaggactatgtgaaggagctggcgggggagaactccctcaccctgcccgtgttctggcagaccgagcggcggggccgggaccgggcggacaagcccgagtacaaggtgaagctctccgtctccttctgcttctccaacacggtgcagattatcgagcactaccacaactcctcctggctggagcacggcggttccccggagaaggcggtgaagtccgccttcgtgaatggcatcgacgcctacctcaaggcccagggcaaataccagaagagcgagagcaagatcacctgggccgacgtggaggactgcctggtgctggtgagcaacaacttctccacccagacctcctacgagaaccagaccaagaaggccatcaacaacaagtttgtccaggaggccatgaccgagtttctgcgggcccagttggaggtctacttcattgagaatcccctggatgcgggaaagatcgccgagcaggtgctcatcaacaagcgcagccgggagaacgccgagcgcacccggctgaacatcaaaaagaagctctcgggcagtgtggacatcgccaaccgggtacagaagtttgtggactgccggacgaaggacaccacccgccgggagctctacatcgtggagggcgactcggccctgggcagcgtcaagctgagccgggacgcggagttccagggcatcatgcccgtccggggcaagatcctcaactgcctgaaggccgactacgccaagatcttcaagagcgagatcatcaccgacctgctgaaggtgctgggttgcggcgtggaggtgcacgacaagcacgccaaggacatggccgccttcgatctgatgaacctgcggtggaacaaggtggtcatctgcaccgatgccgacgtggacggcttccagatccgcaccctcattctcaccatgctctaccgcctcacccccaccctcatccagcggggctacgtctatatcgccgagtcccccctttatgagatcacctacaaggacaagacctggttcgcctactccgacgcggagaagaacgagatcgtgagcggcgaactggcgggcaggaagtgctccatcaaccgctccaagggcctgggcgagaacgagccggacatgatgtggctcaccaccatgaacccggagacacggcggctcatcaaggtcatgcccgaggacgtggagcgcaccgccgccgtcttcgacctgctgctgggggacaacctccagggcagaaaagaccacatcgcggagaacggctataagtatctggagctggcggacatctcctgaccgggcatacggccgctatatagggcggctgaccgttccaagcagcccctttcccgggccgtgcagcagttcaaggccgcggtcagccgtcggagcggccggaaatgcctgtggcagtccggctcggccctatcatccgaaaggatgccgatccggccgaaacccgccaatctatcgccaacaatcctctgaactggattctgaataaggactgataccaatgcccaaaaagaaggcccccgaggagggggcaaagaaggtaaccaaccccaacgtcatgggcctgcggcccgaggtgctggaacagcccatcaccgagacgctggagatcaactacatgccctacgcgatgagcgtcatcgtctcccgggccatcccggagatcgacgggttcaagccctcccaccgcaagctgctttacaccatgtaccagatgcacctgctggggggcgcccgcaccaagagcgccaacgtggtgggccagaccatgaagctcaacccccacggcgacgcggccatctacgacaccatggtgcgcctcagccggggttacggggccctgctccaccccctggtggactccaagggcaacttcggcaaggtgtactcccgggacatggcctgggcggccagccggtacaccgaggtgcggctggaccccatctgcgccgagctgttccgcgacatcgaccaggacacggtggactttgtggacaactacgacggctccatgcaggagccctccctgctgcccaccaccttccccaacgtgctggtgagcgccaaccagggcatcgccgtgggcatggcctccaacctgtgcggcttcaacctgggcgaggtgtgcgacgccacggtggcctttctgaagaacccccaggtgaacctgctggaccacctgaaggcccccgacttccccaccggcggcgagctgctctacgacgagggggcccttcggcagatctatgagacgggccgcggctccttccaggtgcgggccaagtggcgctacctcaagggcgaaaacctcatcgagatctacgagatcccctacaccaccacggtggaggccatcatggacaaggtggccgagctggtgaaggggggcaagatccgggagatcgccgacatgcgggacgagaccgatctgaacggcctcaagatcaccatcgacctcaagcgggggaccgatccggacaagctgatggccaagctcttccgctccaccaccctccaggactccttctcctgcaacttcaacatcctcatcgcgggcatgccccgggtgatgggggtgcgggagattctggacgagtggacgggctggcgcatggagggggtgcggcggcgcacctacttcgtgatgaagaagaagcaggacaagctgcacctgctccgcggcctgaaaaagatcctgctggacatcgaccgggccatcaaaatcatccgggagaccgacgaggacgaccaggtggtgcccaacctgatgatcggcttcggcatcgacggcgtgcaggccgagtacgtggccgacatcaagctgcgcaacatcaacaaggagtacatcctcaagcgcattgaggaggtggccgggctggaggaggagatcgccgacctccaggacatcgtgaacaaccccggccgcatcaaaaagctcatcgtggccgagctccaggcggtgcagaagaagtacgccgtcccccggcggacggagatcgtctacgagtaccagaccgccgccgcggaggacgcggaggacgaaaccccggactacccggtgcacgtattctgctccagggagggctacttcaagaagatcaccccccagtccctgcgcatgagcggggagcagaagtacaaggagggggacggcccctggctccagtgggaggcctccaaccgggacgagctgctggtctttaccgaccggcagcagtgctacaaggcccgcctgagcgacttcgacgactccaaggccagcctgctgggcgactttttgcccaccaagctgggcatggatcccggcgagggcttcgtgtgggcctgtgtcaccgccgactactccgggcacctgtttttcttctttgaaaacggcaaggtggcccgggtggccctgtcggcctatcagacccagacccgccgcaagaagctcaccggcgcttactccgacaagtcccccctggcggcggcctgtctgctgacagaggacacggagatggcggtgacctccaccgagggccgggcggtggtcttccacaccgccgccctcacccccaagaccacccgctccacccagggggtcaacgtcatgaccctcaagcccaagtacaaggtggccgacgcccgccccctggcggacaccaccatcgtcaacgccgcccgctaccgggcccgctccctgcccatcgcaggcatgctgctccggccggaggaccgggccgaggagcagatgacgttactggaataagataaagaaggtatcggctatgaatcgtgtcgcaaagcagtatgtcctcccctatctgtggatcaccctggcgtccgcggtgtacgccgtgggcttcaactggtgctacgagcccaaccagatcggcttcggcggcatcaccggcgtgggccagatcatcaaccacatcctcccctgggcccccatcggcaccgtggtcatcatcctgaacatccccctgttcctgctggggtggaagctgctgggcgggcacctgctggtgtcctccctttactccatgttcatctcctccattttcatcgacattctccacatgcttcacacctttgagcctatggagcccattctggggtgcatcttcggaggcgtgatcatgggcggctccctgggcgtggtgtttctccagggcgccaccaccggcggcaccgatctcattgcccgcctgctcaagctgaagctggcctggctgcccatggggcggctgcttctggcggtggatctgctggtcattgtggcggtggccgtcgccttccgcaacatctacagcgccctctacggcgtggtggccctgtatatctcctccttcgtcatggaccaggtgctctacggcatggacaacgccaaggtggcctatatcatcagcgacgcctacgaccagatttcccacgccattattcacgatatggaccggggcgtcacccttctccacggcgagggcggctggtccggagaggacaagaaggtgctgctggtggccttcaagcagaagcagatcgtggccctcaagcagaccgtcaagagcatcgaccccaacgccttcctgatcgtgtgcgaggcccacgagatcctgggcgacggcttccgggagtataagcacaacgatctctgagctgtccaggggcgggagaacgcgcccctggacaccccccgtcctgcatatgccctgcttttttgcccgcaggcggataaccctctgtgctctgtcatttcacgctggaaaggagacctgtttatgcccggttttgagaaggtacgcaaaaatctggaggcccacggcttcgatgtgacctgcttcgacacggcggcggaggccgcggactacctggaccgcaggctggacggcaaaacggtggggcacggcggctccatcaccctcaaggagctgggcctcctcgatcggctccagagccacgccgtggtgcgcagccactggctgggggacagcttcgcagacgcagccgccgccccggtctatctgacctcggtcaacgccctggcggagaccggcgagctcatcaacatcgacggcacgggcaaccgggtggcctccaccatcttcggccatgaggaggtctactttatcgtgggcgtcaacaagctggctcccgactacgacgccgccctctggcgggcccgcaacgtggcctcccccaaaaacgcccggcggctgggcaaaaagactccctgcgccgtccggggggacaaatgctatgactgcaaaagcccggagcgcatctgccgcgccctggcggtgctgtgggagaggcccaccggcatcggccgggccgaggtggtgctggtcaacgagcctctgggctactgaggaggggagggcgtggcattgaaacgaggcatagcggcgctggcgttgagctgcgccctgctgctcaccggctgctcctcccttctggagaacccctatgcagtggtggagccgcacacggagcgtccggccacggccgaggactcctccgccgtccaggcgggcacctattccgagctggtcaacaccgtgctgttttttgtctcccaggggacagaaaaggggctgattcagcttaccgacgactatgacggggatgtggaggaggatctcaaccgggcctgcctggaggtggccaaggacgaccctctgggggcctatgcggtggactttatcaaaaacgactgcaccaaggtgctcaccacctatgaggccaccattaccatttcctaccgccgcacccgggagcagatacgcagcttggtcaacgtcaccggcaccagcgccatccgggacgaggtgcgcgccgccctggctgattttcagagcgaggtggccctgcgggtgggctacttcactgagagcgccgactccattgccgccctggtgcggcaggcctactacgacgagcccgccggcgccctgggcatgccggagtttaccgtctccctctaccccgcctccggcgggcagcagcgcattgtggagatcctgctcacctatcccgaggacacccaggcgctgcgtcaaaagagcgatgacctccagagcacggcagatgccctggtgctccctctccggccccatcagctctccccctccgcccggcaggccgagctcttttccctggttcgggagcacgtccgcgcccggccggagggcggtcccaccgcctgggacgccctgctgggcgacggggcggacagcgaggggctggccctgacctttcagctcctcagcgggaagatggaggttggctccgttctggtggagggtactctgaacggcgaaccccacttctggaaccagctcaccgccgacggcggcgcccactatgtcgatctcacccgcgacgcctccggcaccacctattccgccgccgaccttctctccctgggctacgtgtgggagggcgcggaagaaaatgcagaaaatttgaattaaccccttgacagcggcggaacggttcgctataatataatccgtcgcttgcaggtgtagctcatctggtagagcgccaccttgccaaggtggaggtagcgagttcgagcctcgtcacctgctccagaaacgaaaacgggacggccgatggccgtcccgttttcatttctggattccacagatttcttttatgcccagggcaaacaaattgccccggtgtcgaagcggcggcccccgctatcggaaccgttcaaccgtcaaccccgtctttttctccagaaaggcgcggagctcctccggggcagcgcccgtcaccccctctttatcgcagagctggccgtggttctttcccagaatgagcaccaggtaacggtcattctccgccagccggaggagcttgctatattgccattgagtggccgcgccggcgattttggtttcatagtgttcctccaaaaagcgcaccgtgcacacctccatccccggcagggcattccgcctggcaaagaaggcgttgattgcgtcctcccccagcagaacggccagcatcaggacggccaccgccccattgagcgccacagttccccactcgccccaggagacccaggccgacagcaggctcagcaccaggagcacccagcaccagacgcgcagcagccgtgagcgcgtcctgcggacggttttacgcagagccctggccagcgcggacagcgccctccggtcataagtggtactgcatatgatttccatagaaaaacctctctttcgtctgcgtgggtatagaatagcaaatatcccgcgccgctggcaagaaagattttcttacgattccttgaagcctctgtaagaaagaaccctatgcttcgggccgcccgagcgggcggcccgttttttcggaaaggagtctctatgccaagctcttccatcgaggccctgggccgcttgatctcccgccaggtggccgggcaccctgaccgtgcccgcgccctgctccgcacggcctacaccctggtgggggtacagatgaagcacttcccgcccaaaaacgtgctccccgcccggtgcgccatgcagggggacacggcccgctccatggccgccgccctgggccgccccggccgggcggcctgcgtcaacatcttcctcccctgcgaggtgctccacgccctgaacatccccccggtgctgcccgaggggctgtcctgctatctggtgtccacggcggcggagcgggtgttcgtggaggcggcggaggagcggggcgtgccggagagctactgctcctaccacaaaatcctgcttggcctggccgagaccggcgtcatggccaggccccggttcatcctcaacacctccctggcctgcgacgccaaccagctcaccttccgccggctggcggagttctgggacgtcccacgcttcacggtggacgtgccctacgccccctcggaggagagtgtcgcccaggtggccgaacagctccgggccatggcggcctttgtccaggcccacggggggcgccccctggaggaggacgcgctgcgggccgcggtggcccgctcccgggccaccgtggagggctaccaccgctacctgtccctgcgggcggagcgctccctctctgacgagatgacctccgagatgctctccgtcttcgccacccactccatgctgggttcgccggaggccctgcgctacaccgagcagctctgcgcccaggtggccgccctgccggaggggcggcgtggaaagcggattctgtggctgcacaccctcccccactggcaggacagcctgcgcgccctgctgaacttccgccccgacgtggagattgtggggtgcgacatggccctggatgccgatgtgctccccgagccggagcgcccctatgagtccatggcccggcggctggtctgctcctccttcaacggcggtgcggagcgccgggcggagcgggcagcggagctggcccgcctcctccgggccgacggggcggtgtacttctgccactggggctgcaagcagacctccggcgcggcccagctcgtcaaacgccggctggaggccgccgggttccccaccctggtgctggatggggatggctgcgacagcggcaacgtgaacgacggccagatggtcacccggctccaggcctttctggagctgctggagggatgcagatgatcggatatacctgtaaatacacccccgtggagctgctggccgccctgggcggccagccggcccttctcaaccgggaggctaacgccttctcccacgccgaggcgctgacccacaaccacttctgctgccacgccaaggcggtgctggaggagtgccgccgggacggcgtgagggagctggtgctggtcaactgctgcgactccatccgccgctgctacgacgtgctccgcgcccagggcgggctggatttcctcttcctgctggaccttccccaccacgacgacggctgcgccaaggcccggctccggggggagctggagcggctggcggcggagtacggggcctaccggggcgccaccctggacgaagcggccctccgggccgccttcgcgccccctgtccccctgccggacggccccttcctggccgtcaccggggcgcgggccggggcgggcctgctggaggccctgcggcgggtctcccccctgccggtggccgatctgacctgcggcggcaaccggagcctgccgcccccgccggaggggctggacggcctggacggcctgctggactggtacgccggggctctgctggggcagatcccctgcctgcgcatggacgcggtgggccgccgggaggagctgctgaaccaccccggcctcaagggcctggtgtaccacaccgtcaagttctgcgacttctactccttcgagtacgagaacctgcgcaggcgcaccgccctgcccctgctcaaggtggagaccgacttcacccccctgtccagcgggcagctctccacccggctggaggcctttctggaggggctggagctccgccccgcccctgcttccgccgcccggcggggggcctatgtggcgggcatcgacagcggctccaccaccaccaacgtggtggtgctcgaccgggcggggaacgtggccgcctccgccatcgtccgcaccggcccaaaggccagccagggcgcggagaaggccttcgccgccctgggcggcttcaccccggaggacatggccgccatcgtggccaccggctacggccggaacaacatccccttcgccaccgggcaggtgaccgagatcacctgccacgcccggggggcccaccgcctgtacccggaggcccgggccatcgtggacatcggcggccaggacagcaaggtcatctgtctggacgagtcgggcggcgtgaccaactttgtgatgaacgacaagtgcgccgccggcaccggacggttcctggagctgatggcccgcaccctggagctgaacctggatgagatggcccgcgtcggcctgcactgggagcaggagctgaccatctccagcatgtgcaccgtctttgccgagtcggaggtggtgtccctcatcgcggacaaccactccgccgccgacattgtccacggcctgaaccagtcggtggccgccaagaccgccgccctggccagccgcgcgggggccaaagggccctatatgatgaccggcggcgtggcccgcaaccggggcgtgacggaggcgctggaggcccgtctgggcgcgcccctgtggctcccccccgagccggatctctgcggagccctgggcgccgccctcttcgctctggacagcatacaataaaaggccgcggcccgcaaacagcgggccgcggctctcgttatatacgtttatttcccccggcgggcgtcgcagacgagcttgacgagctggatcaccagggtgggcaggaaggccagcaggacgatctcgcccaggttggcaaagccgaaggcgggggccaccataaagaggctcttgagcccgggggtgaagagcaccagcagcagaagcaccacaccggcaaggaaggccaggacggagtacttgttggtggatagcttcagccggaaaatggactcggagccccggcagttgaagccatggaacaggcgggccagagtgagggtagcgaaagccatggtggaggccatcacagcgtcgcccccctggtagcccaggtagaaggcgatcatggtgacgatggcgataagcaggccctggccgccgatgcgggccaggaggggccggttgagaatgggctccctggggtcccggggcttttggtccagcaggcccttccgggcgggctccatgccgatggcgatggcgggcagggaatcggtgagcaggttgatgaacagcaggtgcaccggctggaagggcacgggcagggccagcagggaagcgtagagcacgcagaaaatgccggcggtgttgcccgagagaaggaactggatggcatttttgatgttggcgtagacgctgcggccgttgaccaccgccttgacgatggtggcaaagttgtcgtcggccaggatcatggaggcggcgtccttggacacctccgtgccggtgatgcccatggccactccgatgtccgcctttttgagggcgggggcatcgttgacgccgtcgccggtcatggacacgatattgccccggcgctgccaggcgttgacgatgcggatcttatgctccggggatacccgggcgtagaccgaaatgtggggcaggcgctcgtccagctcagtgtcagtcatgccgtccagctccacgccggacaccgcctcgtccccgtcccggaagatgccgagctgccgggcgatggcggaggcggtcaccttgtgatcgccggtaatcatgatggtgcggatgccgccccgcttggcgtcggccacggcctggacggcctcgggccggggcgggtcgatcatggagatgaggccaatgaaggtaaagccgttctcatcctccagggtgagggggcgcacggcgtccagctccttataggcgaaagccagcacccgcaggccctccatggacagctccatgttgacccgggccagctcctccctccgctcgggggtcatctccaccttcccctcccgggtgagcaggtgggtggagcggttcagcagcacgtcgatggctcctttggtgaagagggtaggcaccccatcaatgtcgtggagggtgctcatcagcttgcggtcggagtcaaaggccaactcgcccagacgggggtgctgggcgcggtagctctcctcgtccacgccgaacttttcgcccagcatcaccaaggccacctcggtgggatcgccgatggcggtgccctccttctcgttgttggtggcgtcgctggccagcagggccgccttgagcagcagcctctgtacgtcgttaaccaggctcagatcctctccctccagcagggagccgtcggcgtacaccttctgaggggtcatcttgttctgggtcagggtgcccgtcttgtccgagcagatgacggagacggagcccaggctctccaccgccttgagatccttcataatagcgttctggcgggccatcttctgggtgcccatggccaatacgatggtgacaatggaggacagggcctcggggatagcggccacggccagggccacggcaaacatgagggagtccaaaatgcccatgccggtgcggaagatggacagggcaaacaccaccgcgcagatggccatgatgaccatggccagcttggcggagaagctgtccaggctctgctgcaggggggtcttgcgctgctgggtctggttcataagggcggcgatcttgcccagctcggtgtccatgccggtgccggtgaccagcaccgtggcccggccgtaggtcaccagggagccggagaacaccatgttcttctggtcgcccagggccacctggtcggcatcgatggcctcggccgtcttgtccacgccctcgctctcgccggtgagggaggactcgttgaccttgagggagaagttctccagcacccggccatcggccaccaccatgtccccggcctccagcaggacgatgtcgccgggcaccacgtcggcggaggggatctccacccgcacaccgccccgcatcaccttggccgtgggggaggccatggccttgagactctccagggacttctccgccttctcatactggacggtgcccaggatcgcgttgagcaccagcacggcgaagatgacgatggtgctctccacattgccggagaaggcggagatcaccgctgcgataatgagtatgagtaccatgagatccttgaactgctccagaaagacctggagcgtgctctttttctttccctcggagagcttgttggggccgtactgctccgcccggcggcgggcctcctgggcggacagcccctccgcggaggcgttctgcgcctccagggcctgctgcggtgtctttctgtaataggcctgtgtcatatcactcgttcctttcccagtgttctccggcggagaggcgacaaaaaaagaccttccgccaaccgctgcatgccacagcagttgtcgaaaagtcttgttaccgcattgggcgcatgccgccaggccggaaacccggaccgtggtgttgacggcataccttcaaactactcccttttcaactgctgttatcatagcatagtctcacctttaagtcaatctaattttccattatgggccattctgcccccccttataccttttccggttgacgggcgcaccggctttcgctatactgggagtacaattggtaaggatcaaaaaaggagagtcccatgcattcaaactttgtcaagcgcctgctcaaggcggcctgggttctggagctggtggtcgccgtcctcattctggccgtcaccctgctggagctgttccttctgggggagggaaccctttcccaggtgctgggggggagcttcagcgccgacgccttcttcgccgacgccatgaccatcgtggtgggcatcgaatttgtcaaaatgctgatgctccacaccccccgggcggtcaccgacgtgctgctctttgccatcgcccggcagcttgtggtcaaccactccagcgcggtggacaccctgctgggcgtggccgccgtggccctgatcttcgtcatcaagaagtttctccacaccgacggggacgacgcgcccgccggagacggccgcccctgaaggccggagaagcggaagccgctgggcttccgcttcttttttgcgcccgggtgaaagatttcccgcccctcaatcgtattaggggtgaaagcgctttgactcaatggcaaaggatgtgagacacatgcccgtcacactggaccgcggggaggccgaacggctggtgcacgcctattccgacctgatcctccgcctgagctacacctacctcaagagcaccgacgacgcccaggatatctgccagacggtctttctcaagctgctccaaaagccccgggccttttcctccccggagcatgagaaggcctggatcatccgcacggcggtcaacctgtgcaaggaccatctgaaaagcggctggcggcgcgctaccgtagccctggacgcggcggaggccgtacccgcccccgcggaggaggagggcagccttctctccgccgtcaacctgcttccccccaaataccgcaccgttatttacctgtactactacgagggctacgccgcccgggagatcgcccagcttctgggcgaaaagcccgccaccgtttccacccagctcaaccgcggacgccagcagctccgcacactcttagaaagcgagggaatgacatgagcaaccgctatcgggattccatggaccggctccactttacccaggagcagaagcaggagatggtgaaccgcctgatggaggccgggccggtctcctccgtccgccgccccctccggttccgccgcttcgcggcggtgggtgcagccgccgccctggcgctcagcctgggggtggcgggggccaccggcgccctgggcagcgccggggacgcctttgccggcctgttcggcggcggccccgccgagacggagattatcgaccagatcggctaccccatcggggccagcgccaccagcaacggcgtcaccatcaccgccgacgccatcatgggggacacctactcctacgccatcgtctactccatccgccgggacgacggttcccccctggtcagcgacgagacgctggcggccggagccgaacgggatggcctgctccccctgagattccgcaattacggcactcaggtgcgcacatccggcggcggggcgcacggctcctcctggttctatgacgccgaccccgccgacaacgccatccagttcgtggagatgatgactcaggaccagcccctcaagccgggcaccgcctccgtcaagttccaggatctgtcggtctacacggacaacgactaccgcaccagcgagacactggctgagggcacctggaggctgaaattcgactttgcctttgaggactcctccatctccctgcccgccggccagtccttcaccctcaacggcatggacgccaccctggacggcgtcaccctatctcccctgtccatccaggtggactacaccgtccatcaggagctggtgtggagcgagaaccgggagagcggccgggagaacgagtatgaccgggagcagagctaccgctactttgagtccctgcccgtggtgatcacctacaccgacggcaccacccaggatctcaccaacgccggcggcggcatcacccccggggacggggagaccgtctgccagaagagccggatcttcgacgcgctgcgccccctggacgaggtggcctccgtcaccgtgggagatatcgtcctccccgtcagcgccggataaccgcccgtccataggccgcgcatatacccctataaagagatcatatagggcccggccattcccctgtgctataatagaggcagcaataacagacaggaggaatccctatgatgatccaaggcgttctgggccccatcgacaccgctgaactgggccagaccctgatgcatgagcacatcacctgcgccgactggtccatgcgcatgaatttcggcgcccgcttctttgagtttgaccaggtggccgagatcgccgcgggacagctcggcaaggccaaagccctgggcgtgcgcaccgtggtggacggcacccccgtcaacctgggccgggatatccgcctgatccgggaggtggcccgccgcaccggcctgaacttcatcgcctccaccggcttctactaccaggaggagccctggctgtacttccgggacgaggaggagatctacgacctgctgatgagcgactgcgccgacggcatctccggcaccggcagcaaacccggcatactcaaggccggtgtgggccgcggcggcctcacgcccctgctgcaaaaggtgctccacgccaccggccgggtggcgaaggagaccggcctgcctctgttctgccaccatgacccctccacggccgccggcggggcgattctcgacctgctggcctcctgcggtgtgcccgcctcccgggtgatcctgggccacagcggcgacaccgacaacctggagtacctgaccgccatgctggagcggggctgctggctgggcatggaccgcttcggcttctgcgaccgggacctgggcctggagccccgggtggacaccatcgccgccctgtgccgggccggctggggccaccggctgctgctcagccatgatctggccgcctatctggccttctgggacagttgggagaccaccaagcactccgactggctgcatctggaggaggattacaccttcattcaccgccgggtgctcccgcttctggaggagcggggcctgagccgggcggacatcgaccgcctgctgacgggcaatccccgcgccttctttgagggcgtttaaaagaaaacacaggagcggaggcccgcctgggcctccgctcctcagcctgtcgaaaagtcttttcgacaggctgacgaaccttttgaaactctgaaaaagtttcaaaaggttgtttgatccaacgcgaaagggaaccctgacggttccctttcacactatccttccctccgaaccctttgacagaagggtctattgacagcctgaggagcggaggcacacctgggcctccgctcctgttcgttatgccgggtagcgggtgcgcacggagaagccctcccgttccagagagctccgggtgatctcccggccccagtggatggagctgttgtagttgccctcggtgaccatcaccgagttctccttcttctccagcaccaccaccgtgtggtagtcgccgatgcggatcatatctcccacgcggatggcctcaaagctccggtgagtgcgggcgggcagtgtaccaaaggccgcatcactacagatgagggcaaagccctcacagccgtagccgccggagcgcagcgcctgggaggcgtaaaagttgtcgttcgtccaacgcattccctcggggtagtcggccttcagcgcggtaatggcggcatagaccgcctcctccgtgggaccttcgggctccggccgctccgggttttcctcccccgacacggtaagcagcaccgtcttgatatgtaccccgctgtcaccgccctgttccatcttcagcaccacagccgcctggccgggggccaccgctgtgataaggccggtgccgctgaccgtcaccacctcccggctggagtcggaggtgcagtaggcgtcaaagctcagtgggccgggtacaacggcccccatagggaagccgtaggtgagctgctgccgctcccccaccgccatctcggtgcgctccacggtaaacgtgatgtcttcaagcgccgcaggggtggcggggccgtccaggcccacctccgcgccggcggcctggagctgcttggtcagacgcatgaacagggtcacgccctccgcccgggtcaccggccgggccgggttcatccgcccggcgctgtccccctccatcaggccgcaccgccgcatctcctccacgctctccgccgcccatccgctgatggaagcagtgtcctgaaagcgcgccggggcaccggcgtcgtcgggcagaatgatgcccttttcctccagatagcgcgccagcagggtggccacctgctcccgggtgatggtaccctccgggtgaaaggtagtggcggaggcgccctccaccacgccgctggcactggcccagtagactgcgggagcaaagtagtcggcagccgtcacatcggtaaattgccccgtctgctccaccgcgtccctgtcaatgccctccaggcggctgagtatggccacaaactggccccgattaagcacctcgccgccctcaaagctcctcccgaaggggagaatcaggctgttatccaaggcataggccgtggcctcccgataccaagcctctgcgccgttgtcgatccagcggtcatagtaccagtccaaccggtccacgtcccagtagtcccccgcggccagggcgggcgcggcggaacccgtcagcgcggccgccaaggccaaagccgccagcctgcggccccagtgtcggttctgtctcattcaattgcccccttttccagtccgtttctgtcctctactttacgggatagcccccctctttgtcaaccggcagttcccgccaaatcagcagagcggccggtccgtagccggaccggccgctctgctttaccgctggtactcgaattccaggttatagagggagacgatgtccccgtcctgaattcccatctcctccagccggtcaaacaggccggactggcgaagcatcctgtcaaaccagtttcgggactcgtagtccccgaagttgacgttggccatgagccgctggagccaggggccctccaccagccaggtgtcgtcctcgtgggtgatctccaggggctcggacatgtccacctccggcgggcgctccacataggtgggctcgtacaccgtgatggggggcaggtgctccagctcccgggcggcggcgtacatcagctcccgggtgccctgctgggcggcggcggagatctcatagaagggcaggcccaggccctccacatgggttctcagggcctccagagcggagcggtcggcggcaatgtccaccttgttgcccgccaccagcatgggacggttctccagcccggagccgtactccttcagctcggcctggatggcctcaaagtcggccaccgggtcgcggccctcgctgcccgacacgtccaccacgtggatgagcaggcggcagcggtcgatgtgccgcaggaagtcgtggcccaggcccgccccctcagccgccccctcgatgatgccggggatgtcggccaggacgaaggagacaccctcctccacatacaccacgcccagattgggaaacaaggtggtgaaatggtagttggcgatcttgggccgggccttgctcaccacagagaggagggtggacttgcccacattggggaagcccaccaggcccacgtcggccagcagcttgagctccagaatcacctgccgctcctggccaggcaggcccgccttggcaaagcggggcacctgccgggtgggggtggcgaagtgcttgttgccccagcccccgttcccacccctggccagtacaaagcggtcggtttgggacatgtcgcagataatctcgcccgtctccgcgtcccgcaccaccgtgccgcgggggaccttgatgaccagatcctccccgtccttgcccgagcagcgcttgccttggccgtccatgccgttggcggccacatacttgcgcttatagcggaagtccatcagggtggacatatgctcgttgatctccagaatcacgctgccgccccggccgccgtcgccgccgtcggggccgcccgcggccacgtacttctcccggtggaaggccaccgcgccgttgccgccgctgcccgccttgacggtgatgcgggcggtatctacaaagggtgctgccataaaaacctccttgccacagggtggctcgtcccataggggcggcccttgcggccgcccggagcctgcgccccgataaaataagccccgaacgggaatccgtccggggctagtttacccatatttactgggcgatctcaacgatagagacctgcttgcggtccttgcccaggcgctcaaacttgactctgccgctcttcatggcgaacagggtgtcgtcgctgcccttgccgacattgacgccggggtggatatgggtgccccgctggcggaccaggatgttgccggccaggacgaactgaccgtcaccccgcttcacgcccagacgcttggcctcggaatcgcggccgttgcgggtggagccgacgcccttcttgtgggcgaagaactgaagaccgatgttcagcatggtgtcacacctccaaacttgtgtgttaaaaacgtcgccgtgacggaggtcattcctcctccatcacgctgatatggtcgggatactcctcgtgcaggctggcaaagtgaaccatgagagccgccagaagggtctgacaggtggtctcattggcctcgctcaggccgccggggattttcatggtgatggaagcgtcgctctcccgcaccttgaccgatgcccccaggcccagcacgtcgttgacggcgcactcggtcaggcggacggcgctggtgactgcggcgcagataatatcgcttccctcatcggcgtagccactgtggccctgcacggtgaagcccacaatgcgctctccctccatgtgaaaggtgacggtggtcatcttacacggagatcttgccgatggtcaccttggtgtagggctgacggtggccctgcttgcggcggtagcccttcttcggcttgtacttgaagacgatgaccttcttgcccttgccgttcttcaccacggaggcgtccaccttggcgccctccaccacgggagtgcccacggtgatcttgtcgccgtcgatgacagccagaaccttgtcgaaggtcacgttctcgccggcctcgctggccagcttctcgatgaacagggtatcaccctcggtcaccttgtactgcttgccgccggtctcgatgatcgcatgcatgtagtttcaactccttcattacgggctcgctgtcgggggaggaggtttccctcacttgtttgtcgcgctgcgcaccctccgcgacggccaacggctcaacactccgctgaaactgctgccagactgcgtccggcctgctctcagtctgcgtgttttgctgctgccctgctctcaggcgtctccgcgcttcgttcccattcaaagcggctctgatagtatatcagcacaaatctgataagtcaagcttttttcttctatttggttaccggctcacctttttccggtatgttgtcggctcaaaggctccaatggcctcacagacgccgcacacatccggccggtggtcgaagacagcgccacagaacacacagcggtaaccgtctactgtgaccacctgctcctgggacacgggttcggactccttttccggatggttgcgcttgagccctgccaaggcactcataaaacggaattcatggtccttctcaatttgagaaatctgctcaaagagcaccgcgatctcgtccagcccctcctcgcgggcggtttgggcatagccgggatagagcttggtccactccccatattccccggtcatcgcctcctgaaggttgtccgccgtgctgccgatgccgcacagcctctgatacatcagtttgccgtggactccttcattctgtgccatccgctcaaagagctcggccacttcagcataaccctcctgctgggccttgtcggcaaaaaagagatacttgttgcgggccatagactccccgctgaaggcattccacaggttctgctcggtacgcgtcccttttatatccatattgattctccttaaataataataattactattattatactatttttcttttggttgtcaagagaaaaattcgtaccgatcagcccgccataacgggagttctgttgttggctgcgaccgttctgccgggatggcagcacctagtgggccagccgtccgaagtaccagccggtgacaccgtccttcttcaccagcgcccggtcggagatgcgccgcaccaccgagagggtgtcgccggggcgcaccgccagacggtagtcggtggagtcctcacaccgggtcactccccggtccacatagagatactcggtgagcacctccaagacccggccggtctccaggtggcggcagagggagagctccgccccccgctccagcacctccagggcgttgcggccccagcggatgtttaccgagtccgccgacggggcctgggggtccagggcggtggcggtaggcaggccgtcgtaggcgaaccaggagaaggccccgccgggcctttccggcagcaccagggcgttgagctggccgtccaccttgagggagcagccgccgtcgatggaggcgatatgccgcccctccgccagcagcggggcggcggagggaacgtgggggtgatagagggtcaccggccagtggcccacgatgcaccaccgccggaaggagtgtccctgggagagaaagtcgtcgtttttcatgcacttccaggcgtccagcccctccaggtgcgcctcgtcggccacgccgccgtggacgaagaggtagtcgggggtgagcaggatctccggcatggcctccaggaaggccagctccgggccgaagcgggcccgcaccacctcccgcagagcgggcagctcctccggcccccgggtctcgaagccggcggcgtgccccatctgcaccagcagacagcggtcccgccacacgtccacatagtggcggtagaaccgctcctcctcccctcgcgcggccacaaactcgctcaccaggttgtcgcagttgccccgcaggccgtacaccgtgttccgctccgccagctccatgatgaaccggagggtggtgaggctgtccggccccttctccaccaggtcgcccaccagcaccaggatgtcatcggggccgtaatgggcggcggccagcacgcccttgagaaacggcagattgccgtggatgtcgctgatggccagcacccgccgcccctccgggaaggtcaggcgctttaccgttgctgttctcggcatagatacacctcgctttaccacgctctattttaccacagggggcggaaaaatgctatcgcccctttcccccgatttccaccacgcgctgcgcccaagcccggtagaagtccgcctcgtgggacaccagaagcaccgtgcctgggaaccggtccagcgcccgggccagggactccttggctgccccgtccaggtggttggtgggctcgtccagcaggagaaagttgcagggccgcagggtgagcaggcacagcttgacccgggcctgctcgccgccgctcagcgtcgccacggcctggagggcgtgctcctgccggacgccgcaccgggccagcgccctccgggcctcctgccggtccagggtgggaaaggccccggtcaccagctcctccggcgtccgtgttccatccgtccaggccagggcctgggggaaatagcccagcgccgcctgctccgagaagcggaagcgcccggccagagggggtagccggcccgccagggtgttgagcagggtggattttcccactccgttaaacccggtcagcaccaccttctgtccggcatgcacggagaggtccagcccctccagcaccggactgcggtaccctaccgacagtcccaccacctccaggtctcccgtccggcccgcgggcagcggatggaactcgaacaccggcagggcgctccggccctccggcgccgccagccgctccagacggtccagcctcttctgccgcccccgggccatcttcgcgttgcggcccgcccggtttttgcggatataggcctccgtccgcgcgatctcccgctgctgggcggtatactgccggaggcgctccccctccaggcactcctttttggcctgataggcggcgtagttccccggatacttggtgaggcgccgcccctccaccgcgcagacggcggtgacggcccggttcagaaaggcggcgtcgtgggacaccaccaggaaggcccgctccagcccggtcagcgtgtccgccagccacgccgcctgctcctggtccagaaagttggtgggctcgtccagcagcagcacgtccggctcctccagcagcagcctggccaggagcagcttggcccgctggccgccgctcaattcccccaccgggcggtccagccccagctccgccagccccagtcccgccgccgccttctccacacgggtgtccacctcgtaaaacccacgggcctccagctcctcctgccgccgggccgcggcggccagggccgccccgtcgcccgccgccgcccggtcgtacagctctgtcatggcccgctccagcgcgtagagggcccggaaggccccgtgcagcacctcccccatagtgtgctccgggttcagggcggcatactggtccaggcagcccacccggataccgccctgccacacaatccgccccccgtcgggcaccagttggccggtacacagcttgagcagggtgctctttcctgctccgttccggcccaccacgcctacgtgctccccccggtggagggcaaaggcagcattctgaaacagaggctgcccgccaaaggcgtgggtcagccccgtgatctccaacaaactcatggtattgcttgtcatcctttctgaaaaacgaaagcgggcagaggggccctcgcccctctgcccgcgctcctctgcggtccaaaaaagcgatggacgaaacatcgtccatcgcctgcaaaatgggtacgggaaaccggagcgccctctgggccgccctaccgcttcccgatgaaacccaaccgcggttcagccgcgcagctctgcacaatgtttcaccggttcggattgtgcagagcggagtctttttacccgtttgtcagtcagatgaaagttcattggctgttctccttgctgtgatacgctctcaaccatagcacaggtccccggccttgtcaagccggggacctgcacggagaggcagccgcctcaggcggccagattgcggacgatattgaagatggagatggccagcaccaggagctggacggcgttgaaggccttctccaccgctgcctcggagcacttcttgttgaggctggccccgataaagccgccggcgatggcgcccacgatcatgaccggggcgatggacaggtcgaacaccccgaagccggtggtgagggccacggtggtcagcttggagatctgggcgaagaggatggtcaccagggagcacaccgtggccgtcttggtgtcaaaggagaacaggtagataatgagggccacgttgatgggcccgccgccgatgcccaggaaggaggagcagatgcccaggaagacgcccaccagcagggacaccaccacgccccgcagctcccggctggggatgcggctcttgttcttcatgtagaggaacacggccaagatgagcagggagagcaccacgttctgcaccacggtgacggcggagttggcccggagggcgtccacgatcacctggagcagcttctcccccgccagaccgcccgccaccgagcccagggccagggggatggcggtgccgaaggggattttggtacgggccagcatctgcttgccgatggacaccaccgacatggagaacaccgtcagggaggagagcacgccgatggtctgcacatcaaagccgtggagcacgtccatcagcggcttgatgatgacgccgccgcccatgccggtgagggaacccaccgtggtggcgccgatggcgatgaggaagtagagcacgtactgcaagggaacgccttctttcgatggaattcagcgccggctcagccgccgcaggggcagccgcccacgggggcggagttgagcgcagggtccttcatgcagaggtggacggcggcggtggtgaaggtgcggggcagggccaggatgttggggttggggccggtgtacttgcgcatggcgtcggccagggcctcctcgaaggtggcgcgggtcttgaggcccatgctgcgggcgatgcccggctcccgggcgcccacgatgtagatggcgctggtgtgctcctcggccaggtggccgcagctcatcatggagaagccatggaaggggtggaaggcgttggcgaagcggtacttgcggatgtactcctccttggtggcgaagtactcgccgtaccggttcatgtcggggaggatgttcatgtagtcgtgctggaacaggtcgtacagctcccgcaggtagggccagcgctcgtcgtggaagtagccgtcgcagatggaggacacgatgaacacgcaccggtcgctcatgatgcgcctatggcggatgacctgggcggacagggcctgcatcatctggatggggttggtgcccatgccgttgccgtagtggaagttggtgggcatgccgaacacgatgatgtcgtacttcttctccgcccagtggacgtaggtgcgcttgtccgccgtcttccaggacacgggctgcatctccctggcccagccggagtgaatctcgatctggcggctcttggtgtccagcacggcgtcgcagcagaagaatttcttgcccatcttctcctccatccgcatgccctgctggtcgaacttgtgccgcatctcgctgttcgtggacacgggcacgaagtcctgccggtgcatcacctggggcacgtggtgggcagagatgctccgccagtgggagatgccggtggcgcagtgcttgtagccgccggagtagccgccataggggttgccctgggtgtggccgatgagcaccgccacgtccgcgtcatagacgtacttgttcatgatcacgtggtccccctgggcggtgtagcccaggtccaccaggtggtcgtagtcctcgctgtcgtggctggtgatctggccggtggggtagaactcgccgaacagctcggggcccaggatggtctgcatctcggccacggtggcccgggggtgcaggccgttggagaacagcagcagcacgtccttctgctccaccccggcggcgtacagctcgtccaggcaggcacggatggccaccttccggtggctggtaggctggttgccccccttgacaatgtccgggatgacgatgaccaccgacttgcccggcccggccagctccttcagcgggggcatgccgatggggttgcggatggacgccagggtagcggcgtacaggctgtcccagtcctggggcagacaggggggatccgccaccgtctccccggggatgaagatgtccgtgctgtcgggcagctccgcgcccagcaggccctgcccgtattcaaattccagtttcataatttacctccgtcctcaatggcccagatacaggcggatgatttccagatactcctcggggtagaagccgatctcgccgctgaaccgggtcagggcgatgaggccgccgtcgatgtccgcgatggaggccagcatggcggcgttgtccgccttgaggccgccgccgtacaccacgtccaggccgccggtgcgctccttgacgaagcgggcgatcttctcgatgtagggcttgtcggccggggtcttgccgggcccgatggaccagatgggctcgtaggcgatgaccacccggctcctgtccgccccgtccaggccgatggcgagctggtcgcccagcacctgctgccaggcctcctgctcctcgctcttctcgccgatgcagtagagcaccttgagccccgcggcctgggcgcacttgatctcctggttcagcaggcggttgacggcggcggtgtcggtgacgccggcctccgccaggatgcccgccttgtcgttgcgctcctcgcagtggccgatcagcgtccagccgcagcccagggcggcggcggcgtgggcgggccggttggtggtgaaggcaccgaagttgccgcccaccgcggtgtcggcccggaagaccccctggcagcccagctccacccggctgtcggcggtgcgggccgcggccgcgggaatcaggtgggcctccgggaagaagtccacaaactccgcctccgccgggtcatagcccgtcaggccctgctgggtcccggccacaatggccctgccccactcggccacgggggccaggcggttgaccccgcccagctccaccggcacgtcaaaacgcttgagattcaaaaaaatgtgtttcattcagttgacacccggctttcccaaattttgaaacatatagcccttgtagccctccacgcccggctggttgaaggggttgacgcccagcagcttgcaggagagatagcaggcaaagaggaagaaatagaacagcccgcccagggtgtgggcgtcgatggcggggatggagaggttcaggcaggggatgccccggtcgctgtgggcccgcatggtggcctggcgggcggtgttgttgacgtcccagaagtccttgcccgtcaggtagtcgaagtagtccttcttggcctcggggggcaggagcaccgacgcgtcgcgggcgcgcacctccacgaaggtctcgaagaggatgggactgccctcctggatgaactggccgatggagtggagatcctccgagttggaggccgccaccgggtagagggcggtgccctccttgccctcgctctcggcgaagagctgaatccaccacttggcgaagtaatccagccggggttcgaaaaaggagagcatctccaggcggtagccgtgctccaacagcagccggcgcaggcaggcgtagcgcagggccgggttctcctccgccggggcggcgaggagggtatcccgcatgtcccgcatcccctgcaccagcgcgcggatgtccaccccggccaccgccatggggaagagccccacgtcgctgcccaccgagtaccgcccgccgatggtctcggggaaggtgaggaacgtatagccctggtcgaggcagagctggtggagcgtggagcccggcgtgccggtggcgaagatgcgctttgccgcgccctccgcgccgtagcgccgctccaggtactggcgcagcacccggaaggcaatccccggctccagggtctcaaagttcttggcgatgcagtcgatgtagatggattgatatccgtccagctcccgcagagtgcgggccatctcgcaggcggagatggtgttgcccgcccacagaatggcggggcccccctccggccgcagggccttgacggcggcccgggacgcctggttggagccgccgattccgatgaccacgaaggcgtcggcgtcggcccgcacccgcgccgcctgctccagcaggaagtccacccgctcgggcccggccgcctcgtccacactgtgccagcccaggttgtcccggtaccgctcctctcccgccgccgcctcggccagcaggggcgcggcggcgcgcacctgctcctccagcgcgccgggggccagcaccggccgcgcgtcggtaaaggacaggttgatgccgtccatgctcagccctccttggcgtagcgggccgccatgtcctccagggtagccggctccaccaggggggccttgccgtaactgccgaactccacgatcagggtgcccacggcctccttcacgccacggcgcatggcgtcggtaatgagagccacggccccctcgtcgccagtgccgtacatgacggtgtccatgatgggggccaggaaggcgcggggatcaaaggcatcccgcttctcgtccagcagcttccagacgccgcccaccctggcgtcctccttcagctccgggtggtcgcggaacagctcgcggaagttgcgggtgacggccaggcggatgtcggtgtccacgttgatcttgccgatgccgcaggggatggccgccttcagctcctccttggagatgccgtaggcgttctggatgttcccgcccagggcgttgatctcattgacgatatactggggaacggtggaggagccgtgggacaccagggtgccctggatgccctcgtggttcatgcactccttgatggcgatggggatctccttccgcagcttcacgtccttgcccttgctggcgccgtgcatggtgccgtagctgatggccaaggcgtccaccccggtctttttgaagaactcaatggcggagagggggttggtgtaggtggagttggcggcaaagacgtggtcctccacgccggccagcacgcccagctcgccctccacggacacgccgcgggcgtgggcgtacttgaccacctcgcgggtgagctccacattctcctcaaaggggagggaggagccgtcgatcatcacggaggtgtaccccccctcgatggcggccacgcaggagtcgaagttcttgccgtgatccaggtggagcaccacggggatagggctttgctcggcgaacttcttcaccgcctcggcgatgttgcgggcccccttcttcttgtcctccagggtgccgttggcgaaatccacccggccgcccatgaaggcgttggccaggtcggccccctgcagaatggccggggagcggaacatctcatgtacggcgatgaccgcctcggcctgggccacggcgttgacgttgaaggccccctgggcatagccgtatttcacggtggcgtccagaaccggacgcagaggtaccagaggcatagcaattctcctttcggttattcccttatcttgtatagacggtgcgcccgcccaccacggtgcgggccacctggtaatcgccgtccagcaggaccagatcggcgtcctttcccacgtccagctcccccttgccggcccagcccatgaggcgggcggggttggcggtcatgaggcaggagacggtctccgccccctccccggtgaaggccatgaggttgcgcagggcctgggccatggtgagggtggagccggcccggacgccgttgggcagcttggcgtccccgttctccacaattacgtcgttgactcccagcttgtaactgccgtcgggcaggccggcggccatgatggagtcggtgacggctaccacccggtcgtaccccttggccctgaggtagaggcgcacagtgcccgggtggaggtggcggccgtcgcagatggcctccacgtacacatcccgctccagggccacgccgaagatggcggggtcgtgctggtggaacagccgcatggcgttgcccagatgggtgaccgaacgcacaccggcgtccacacaggccgcgcactggtcgtagcccgcgccgctgtggcccatggcgcagacgatgcccatggcgttgaggcgggggatcagcccgggcacgcctgggatctcgggggccagggtggtatagcgcacgtggccgccggaggccttctgatacttggcaaagagctccgcgtcggcggtgtgcatcagcaggtgctcgggcatggcccccttgtactcggaggacaggcaggggccctccaggtggacgcccagcagggccgccccgccgcaggggccgccctcgatgacctgcctggcctgctccatgcaccagagggtctgctccggcgtgtcggtgagcaccgagcacagccagccggtgacgccctgggaggcgaagaaccggccgatcgtgcgcaggccctcggcgtcggcggcgttcacgtccaccccggcggcgccgtgggtgtgcaggtccagaaaaccgggcagcacccgcaatccggcggcgtccacctccggcaggcccttctcattgtggtgcccgcggctcagggcggtgatgtgcccgtcctccaccgccatgtccaggggggtaaaggccccgttccacaggacggagccgtttttcagataaaaggagttgtccatggcggcctcctcaataggccgtctgggcggcgttggcgttgacgtagagcagggcgtcggggtggttctgggccagggtggcggggaaggcggcggtcacctcgccgtaagccgcccggcggcacacggcccggtgccagtcccggaacacgcccaggcgcagcttccgcgcccccagaatctccttcatgccgatggtgacgcactttttgggcatatcctccagcgcgccgcccaggtcgcccacgcagttggtggccctcgtctccgggtggatgtccagcacccgggtggggagctgggcgaactgctcggccgtcagctccggctggggctcgttgaaggccaggtggccggtgatgccgatgccgccgaaggcgatgtccacgccgcccagctcctcgatcagggcggggatgcggcccaggtcgttgggatcggggaagacccgctgctcctcgggcatgagcagctccggggcgatcttgccatatacctcccgggccatgaagccccggaaggacaggggattctcctcggcgatccactggccgtcgtcggtgaggtactcgtccatgttgatgaaccagcagttcctcagggagagctgctcccggttgaccagccgcacgaagatggggtactgccccaccggccccaccgggcagataaagacggtgggctttccggcggcgttgttggcgcggatggcagcgcacatctcggcggccatctcgtaaaagacctcgccggagtcgcccagcttgaggatggggagcttggcgcccttgcccagctcctgggcggaaatatgatagtagtccatagtcgtacctccttttgtcattgaaacaggtgctccaaattcatctggcggatcatcttgacgatctccttggtgcgggagcagccgaacttgcccagcaggcccttgatctgggtcttaatggtcaccacctccacgcagcggagcctggcgatctccgccaccttcttgtcctggagcagcagcttgaccagctcgtgctccgccggcgtcaggtgggccacgttgttgatgaagaaaatcagggagcgctcgctgcggcgcagacgggcgtactcctgcatgacggtgttctggatctttgggtccagctccgcccgcccctcgctggcccggcggatgtgctccagcagcctctcctcctcacagcccttcaccacatagtccaccgcgccggtgcccatggcgctggtgatcatgtcgtcggtctcatgggcggtgaggaacaggattttgacctccgggtgccgcgccgtgatgacctcggcggcccggatgcccgcgtcgatggtctccatttcgatgtccatcagaatcacgtcgcagggggtggttccggccagggccacgatctcctctccggaggcggcggagcccaccacctccatatcgctctgggcggagaccacgtcgcagaagtcctcccgcagcagggggaagtcctccgccaccatcacccggattgtctttgccattgtgtgatcactccttctgacgggggtcgtagaggggcagcatgatctggaaccgggccccctccccatcgcggctctccaggcgcaggcggcccaggtggctgcggacgatcttccgcacatagtacaggcccatgccccagttgtaattggtgtttttgctggtgacaaagggctcgaaaatcttgccctggcgctccggcgggatgcccgggccgttgtcctccacctccagcacggtccacatgcgctcggcgcggacacgaagcaccacctgcggctcctcccgccccgcctgaacggccgcctcatacccattgcacagcaggttgcacaccgcctcgctcaggtggctgagatccgccagcaccaatcggtcggtgcccacatccaggcgaaccggctggccggggtacttgccgtgaaaccgctccaccgccgcctccaccagcccctccaccggcacggccgtgagggcaatggagttgttcttgaccgtgcggtagagctcgtccatcctccgcagcattccctcgttcagctcgttgagctgaacggcgcaggcgctcacctgcgccatgtccggagggtcctccgccaaagcccgggacagcttcttgtggagcacccggctggacaggagctggttctttaccccgtggacaaagacggatactccggtgcccgccgcgtcgaacttccgcttgaggatcatatcctgccgggtgtcgtcataggtaagctgggtatagcgcaccagattgtagctgcccagcaccacaaagaacaccgtgcacagacccaggatgatccaccccagggcgggcagcgccccgctgatgtagctgctgatgcccaggcggatatactcggagatgaacatgttgtagatctgtgccgggtccttgctggcgtagagcaggtagagggtggagatactggcgaaggagagcagcacatagcgggtgttgcgcttgaaaactggcatggtggtggcatggtactcctggaaaaacagcagacccgccgccaccagataaaggatgatccaggccagcgaaacgtgaatggtcagcggcaggagccagaagcgcccactcaccaccgtgcgaaacacggccggataataataaacgagggacaatgccggtaccatacatgccgcaaggcgcaggcttttcatcctgcgccggagggccgggatcatggtggcctccagtgcggcctgtagggcaaacaggggaaacagggagcggcctactgccaccacatagcccagccggtccatagggattggaagcgcatggagccacacctgcagctttggaaccagaaacaggaactcccgctgttgggctgctgtgccgccgatggccgcgatatagacaatgatgcccgcaaacatgaccaggttacacacactcatgcccagcaaatacagggagagcgagtccttacgccgcagagccacatacagcgatgtggccagacacagtatcagtacgagaatcagcacggtgcctctcccccctgcgtggattcagttctttattatatcgcgttctctccgccagtgcaacgcataacacaaagagcgccggggctccgccaaatacggagccccggcggggttggcagtcatttacttcgcggcgctgtaggcgtcgtaagcctcctgcattacatcaaagagcacatagtcctccacaggaacattctcggtaatggtgccattatccaggaaaatgccctgctgggtctcatagaccgtcttgatggcatccatgtcgccgcagacctcggtgatggtctgccagtcggcctcgccaactgcggccagcatggtgtcctcgggggcgtccagctccttggccagcaacttggccatctcctcgggatgggcagcgcgccagtcatgagccttgtccagggcctgggcaaaacgcaccaggatgtcgtggttggcctcggcgtactcaggggtacaaatgtagctggaggggaagatggcgctgtccaggaagtcggcgttggtgcccagatccacgtagttgtcgcccagagcgttctgcagggtgacggtattgggggaccaggaggcggcggcgtcaatctgcccggagatcatggcggtggtcatcccgtccacggtcatctctacggtgttgatatcatccatggtcatgccggcacgggccagggcctgctccagaataatctcagaggaggtgccggaggacacagcaacggtcttacccttcagatcctcgatggtttcaatgcccttggccttgttgcccaccaccacatcggacagggaggtggtgtgatccatctggaagatttttgcctcgccctgaatgcacagcttatgggcaccgtggccgatctgggaaatgtcaatgtcgccggaggccatggcggcgatttcggcggggccgccctggaactcaaaggtctcaacggtcaggcccacttcctcaaagtagccctgctcaatgcccacaaacagggagccggcggagcccaggttgggcatgtacgccacgcggacggtggcgggctcataggtgggggtgtcggccgcgggggtctcggtgccgatggcaggggactcggtgttgggcgctggggactcattgttggcgggagtcccgcaggcggccagggagaagaccattccgcaggccagtgcaagagagagcagtttcttcttcatgatagttcctccttaattatttatgatgatccggctcatcccggaacaatcatacttacttgcggacagagaggtactcctgatagacctgactccagatgtgattcttcagttccaggaatcgaggactcatcttggtctcctgatcgcggggataggggatgtcgatgtccacaatctccttgacacggccggggcgggcacacatgatgaccacccgctgggccagaatgatggcctcctctacgtcgtgggtgatgaagaagcaggtcttctgctccttctcccaggtgttgagcagctcctgctggagttgggtacgggtctgtgcgtccagggcgccgaaaggctcatccatcagcagcaccttgggattgaccgcgtaggcgcgggcgatggcgacgcgctgcttcatgccgccggagagctctttggggtaggccttggcgaagccctccagatccaccatcttcaaatacttgtgggccagctcctcggcctcctccttgctcttaccctggagcttgagcccaaactggacgttcttctccacggtgagccagggaaacagggcatactgctggaacacgatgccacggtcggggccgggccctgtaacctctgcgccatctaccaaaaccttgccctcggtaggggtctccagtccgccgataatattgagcaaggtggacttaccgcagccggaagggccgacaacacagataaactcattttcatgaatatccatatccacgccgttgagggccaccatctcaccgttgcgaccgttaaacttcttgacgacgtggtcgatatgtacctttactgctgaatggtttcctgccatcccgtaaacctcctctcaaggaatttcacaatcttttcaaagcagatgccgataatacccagaagaatgattcccatgagcattacgtccatctggtagtatccattggcctgctgaatcatcatgccgatgcccttgtcgccgcccacaatctcagaggccatcagagtggtcatagaggtggacaggcccagccgggccgcgaccaggatgaagggagtggaggccgggatggtgattttgaagaaaatgtccttctgcttggcgcccagtacacgggccgccttgatcagggtggtgtccactcccttgacgccctgatagatggtgataaccatgaccaggaacgcggcgatgaagatgacggtgaccttactgacctggcctacacccagtgctgcgatgatcaggaacacataggccagcggggggatgttgcggataaactgaatccagggctccaccacgtggcgaaaggggtcataccacgccatgaggaacgccaccgggatagatactacaaacgcgatggcaaagccggacagtacacgggacaggctggcccacacatggccccacaaaacgccgctggcggccttactgataaaggcatccaccacagctttcggtgtagcgaacaccagtggccacgtataggcggcgaacagccagattgcaatcgcaacggccagtgaaatgagcacccatacccagttgggtattttgctccagaaagacgattttttcagtcgcatcgaaaccgagcctcctttgttgcttctcagtatacaaaaaccagccggtttcgaaaagtatgaagttttatcatactttccccgtactgcggtaaaaaacccggccggagcgtttgctccggccgggttcatcgggaaccgcatgttcagaacagtcgcgccatggacggcaactccggccccagcaggggccggcaccagccgcagaaggcttcggtcacgtcggtgccgccggcggtgaggtgctccgccgggagcacccgctcgcccagcatgacctcctcgatgggcaccaggaaggtctcgcagcggtagggcgcggaggacaggcggcggaaggccaccatctgccccgtctccccggccagcaccgcccggcaggccgcgcggcccgcctcctctgcttcggcggcatccaccggggactgccaggcgatggaggcccgggccaggatgcccggcttctcgctgcgggccttgatgcccagccgccgcaccaccagctgcgccaggtgggaggacacatctccgaagtacgtggagcgcccggtctggaagatggggggcacgatgggcttgccctcgtcgtcgtggagaccctcgctggccaccacgaccacgccgcccagcttgcggtacatatcgcccaccctgtccaggaactcgtcctcatgaaacggccgctcgggagggtagagcaggtggggcgcgtcgccctcctgctcccgggccagggcggcggcggccgtggtccagcccgcgttgcggcccagagcctccagcaccaccacgtggatgggcaggctgcgcacgtccacccccagttcccgcaccgtgcccgccatgtagcgggccacgctgccgaagccggggcagtggtcggtgacagcgatgtcgttgtccatggtcttggggatgcccatgacggagatccccctgtcccggcacaccgccgccaacttgccgcaggcgtccatggtgccgttgccgccgttcatcagcacgtagcggatgtgcttctccgccaggatatccgccatgcgggcgtagtcctccgcctccagggcgtcccgggaggtgccgatggcggtggcgggggtggtgggcagccgctccagctccccctcgggcacagagccgaagtccagcagcttctccttcagcagtccgccggtgccgcccacagcgccgtaaacatgctccaccaggccgctggcctgggcctcccggaccgccccatacagggagcagttgagcacggcggtggggccgcccccgtgaatgatgatcaggttctccttcaatggggttccctcctcgttttcagtccatttcgtctcattataatgccgtccgccaaaatccacaaggaggatttctcgtcataccttttgacaaagaagggggtgcgcaccaggctggcgcgcacccccctcttgaactccgctaccgggccgcacgggcggccagggccacccagccgttctgctcccgccgctcaaacacggccaggccattccgctccagagcggcctccacttcgccggcccgggtgtcgatgatgccggagcacaggaacaccccgtccgcgtccaggaattcccccgcccgggcggacaggggtatgatcacgtcggccacgatgttggccagcaccagggcgtacttctgccgggccagctcggccaccagggccccgtcggtgaggacgttgcccgcccgcacgttatagcggtcccgcccgatgccgttgagagcggcgttctcgtaggccacatccaccgccttgggatcgatatccactgccgtcgccgcggaggcccccaggaccagggcggcgatggagaggataccgctgccgcagcccagatccagcaccggctttccggggacggtgtaccgctccagccccatgaggcagagctgggtggaggcgtggctcccggtgccgaaggtgaggccaggattgaggtacaggggcgccttccccgccgggacgggctctccccgctcccactcgggcacgatgtagagcctctcccccaccggcatgggcttgtagtacttctgccaggagtgggcccagtcgttgtcccccaggctggcgagcgaatagggctggtcgatgcccgccagccatccctcaagctgcttccggccgtcggcgtcgtcggtgatgtagaacttcacccggcagacgcccttcatgcgggccagcaggccgtcgtccacgtagtcccagtactggtggttctgctccagaaaggtcttgaagtcctcctcgtcctcgatggccagcccggtgaccccattgccggtaagccgggcgcacagggcgtccagctccgcctcggtggtgtccagggtcacttccagccacttcacgtcctccatcagcggtgcctccccaggaagaacagggccacggtgcccgggccggagtgggcaccgatgacggggcccacgttgttgagcaccacggtctgcacgccgaagcggcgcttcacgtcctcggccaccttgttggcgtcctcctcgcagtcgccgtggctgatgaagacggtctggcccgccgggtcgatggcggtctccgccatatggtccaccagggccttgagggatgcattgcggccccgggcggtgcccacctttgtcaggcggccctcgtcgtccacatgcatgacaggcttgatggacagcatggtgcccagtacggcggtcgcggaggaaatgcggccgccccgcttgaggaagtggaggtcgtccaccgtaaaccagtggcacaggtgaagtttgttctcctccagccagtcccgcacctcgccgatgcccctgccctcgttcttcatgcgggcggcgtaccacaccagcaggccctggcccagggaggcgcacagggagtccaccacgtacaccttccgctccggatactgctcggagagctcctgggcggcgatctgggcggagtggcaggtggcggacaggccggaggagaaggccaccaccagcacgtccctcccctccttcaggtggggctctatggtctcggtgaagtcggacacattgaccgccgaggtggtggccatctccccctcccggagctggcggtagaagtccttcgggtcgatctcccggttgtccggccagttgcggtaggtcttgttcctcatggtaaaggacaggggcagcacctccacccccagttcctttaccagcgcgtccgtcagatcggccgacgagtcggtcagcaggacataatcattcatctgcaaattacctccagtattcacacataccgggcacgcccggttattttcggttcttctccggctggggccgccgctctcgcagcagttccagaatccgctgacaggccagccggtcggcatagctgcgcagagcgagggccagggccaggccgggcagctcctccgcctcggcgctgccgtccaggctgcccgccgtcacgtccagcgcccggtccagctcctcccgaaactgttcgtacagcttctggggcggccgcccctccgacgcggcggccagcagcagccccgcgtccttcaccgagagcacctgcttgagggcgcacagggcggtcagataggccaggtgggtgcgggagtaccgctttccctcggcccggggcatggccccgtccttgatatagttgttgaccatggcggaggtaaggctctccccctctccatagtggatgagctgacggggcatataggaaatgagctggtccatatacaggccgatgtcgggaaatgcctcccactccaccgggcgctcacgctcgaggcgctccttcagctcgcggatttcctccacggacgcctcctcctttctggtttcaaacatgacgtatcaaaatattggtgttattatatcacatcggttttcggtaagtaaaggcccgcagggcatgaaaaagggccgctatggtcacataacaaaattatgtgaccatagcggcccccgatgcggttacatctcccagtcggcgtagtcctccgcctcggagtcgtccacagcggcggtggacaggccaggcagcatgcctctcagcttggccaccacggccatgatcttgtcccagtagagcaccgccgcatagagcagcgcgcccaggacggccaacagggaaaagagcttcacaagggccccgaacaacttcttcatggacagaaagcctccttctgcgttgacactctgtgccgtatgcttccagtgtacacgtttccggtgcaaaatacaagtgtcccctcccactttcttgaaacttttttcccttgtaatttgaggcaaaatagaatacaataagagaacaaatgggatccattctgcccccgctccggcgggtgtacgcttgcattttcccacggaaaggaaggatgcgtccatgaagctccaaaccgaaaagggcgagatcaccatcagcagcgacgtgttcaccaacatcaccggtgcggctgccaccaactgctacggcgtcaagggcatggcgatgcgctccaagacggacggtctggtgcatctgctgcgccgggagtccatgggtaagggcgtcaaggtcacttacaacgaggactcctccgtctccatcgagctgcatattatggtggacaacggggtgaacctgatggcggtgagccgctccatcatgagcgaggttcgctatatcgtcagccgcaccacgggcgccgaggtgcgcagcgtggatgtgtgcatcgactccatggtcatcggctgaaacggcccgcgcccatcgaaaggaaggaacaaccgatatgagagagagcattgacggagcgtcgtttgcccaggccatgattcacgcggcggcctccctcaatctgcagaagcagcagatcaacgaactgaacgtcttccccgtgcccgacggggacaccggcaccaacatgagcctgaccctcggcaccgccgcggcggagctgcgcaagaagcagccccacaccgtgggcgaggccgccgccaccaacgcctccgccctgctgcggggcgcccggggcaactccggcgtcattctgtccctgctcttccgcggctttgccaaggcggtcaaggacaaggacagcatcgacggtcgcgatctggccatcgccctggacttcggcgtggccgccgcctacaaggcggtgatgaagcccgccgagggcaccatcctcaccgtctcccgcctgacggcggccagggccgccgacgcagcccgccagacccccaacgacccggaggccgtgctggaggccgccatcgccgaggggcagctcgccctggagcacaccaccgagatgaaccccgtcctgaagaaggccggtgtggtggacgccggcggcaagggcttcctggtgatcctccagggcatgctggactccctgcggggcgtgcccatgcccgagggggacagcgagggggaggcgaaggtggagagcaagaccgactacgcggccattgccgcggaggagatcaccttcaccttcgacaccgtgttcattgtccgcaaaacctctccccacaaggggctggaggcctttgaggcctatctgaacagcatcggcgacagtctggtcatcggcgaggacgacgactgcttcaaggtccacgtccacaccgacattcccggcgctgccctcaccgaggctcagaagtacggcaccctggagctggccaagattgagaacatgcgcacccaggcggaggatctggccgccggacgccacatccagagcaccgacgatctggacgcggtggaggccgagctggaggggaatcacggggcacggaagatcgccccgccggagaagaagtacggcgtggtggccgtggcggcgggcgacggcctggccgcggtattccgcgatctgggggccgacggcgtcattagcggcggccagaccatgaacccctccaccgacgacatcctgcgggagatcgacgctacccccgccgaggtggtcttcgtcctgcccaacaacaagaacatcatcatggcggccgagcagtgcgtccgcctggtggagggcaagcaggtggtggtgctccccaccaagacgatcccccagggcatctccgccctgatggtgatggaccccgaggcggaggtggaggacaaccgcgccgccatggcggaggccatcggccgggtgcacacctccgagattacctacgccgcccgggacagcgacttcgacggctttgccatcaagcggggcgactatctggccctgacggagcaccagctcttcggcactgaccgcaagctggagaagctgctccgccgcctggcggaggccgaggcccagcagagcgccgagtttatcaacattttctacggcgaggatgtcagtgagaaggaggcccagaaggccctcaagctctttaccgagtgctgtcccagcgccgagatcaccctgctctccggcggtcagcctgtctattactatatgatttccgccgaataagcccacgcaaacagaaaaaaggtacgcccctgcggggcgtacctttttttgtgtttatgcatcagagcaccttggacaaaaactccctggtgcgctcctccttcggattggcaaagaaggcgtggggctcgttctgctccagaatgtgtccgccgtccatgaacaggacgcgggagcccacctcccgggcgaagcccatctcgtgggtgaccaccaccatggtcatgccctcgtcggccagctccttcatgacctccaggacctcgcccaccatctcggggtccagggcggaggtgggctcatcaaagagcatgaccttgggcttcatggccagcgcccgcacgatggcgatgcgctgcttctggccgccggagagctgaatgggataggagtccgcccggtccttgaggcccacccggtccagcagcttctccgcttcagcgtcagcctcctcctggctcatgagcttggtcttgaccggggccagggtgatgtttttccgaatcgtcatgttggggaacaggttgaagtgttggaacaccatgcccatctggcggcggatggcattgatgtcggtcttgcggtcgttgatcacggtcccctcaaaggagattgtgccggaggtgggagtctccagcaggttcatgcagcgcaggaaggtggactttccggagccggatggcccgatgatgaccaccttttccccctgctcgatggtctcggagatatcgtccagaaccagattctttccaaagcgcttggtcaggtgttcaacggcgatcactttccctcagcctcctttccattttggcaaagatgacggaaagtaccttcgtaatgcagaagtagacgacggcaatgataatcagcggcggcatggcgtccatggtacggctctgtaccgtggaatatgccttggtcaggtcggtcataccgatgtaccccaccacggcggtctccttcaccagcacaataaactcgctggcataggtgggcaggcagttcttgatgccctgggggaaaatgatactccacatcgtctgtccgtgggtcaggcccaggctgcgtcccgcctccatctgccccttgtccaccgcaaggatgccggagcggaaaatctccgccgtataggccgcggagttgaggccgaaggcgatgatgcccaccgctgtcttgttggtccaggtgaccagcaccacgaagtaaataaacatgagctgcaccaccacggggatgccgcggatgacgtcgatgtacgccttggcagggccgcgcagaatcctgtaccgggaaattttcatcagacagaggagcattcccagcaccgtgctgatgcagatggcgccgagggtaatggccagtgtgttccccaggccggagaaatagagcttccagcggtcggcggcgacaaacgccaggtagaagcggtcacccagcttggcaagctcttgtagaaacagctccaccgaaaaacctcctttttcgttttttccaaaacacagggagagcctgcgccgcccaatgcggcgcaggctttccactttttagttggctttgtttatttcagcaccacgatcgcctgggtggcctcgtagtactcgttggtgaagtccatgacctgctgcttctcctcggtgatggagatgccggcggccaggaagtccaccttgccgctttgcagggcgccgggcagggcgtcgaagtccatgttctcaatctccagatcatagcccatggtggcgcacaggtacttggcgtagtcgatatcgaagcccatcagggtctcgccgtcgtcgcccacgtactcaaagggctcgaactcggcattggtgcccatggtcagggtgcccttggactcataggagggcagctcgggcagctctacatcctcgttggaaatgtgcttctgcaccagcaggtcgtaggtgccgttctcgttcagggtctccatggcggcgttgaactcctcggtgagctcggagcccttgggcaggccgatggcataggcctccttggtgtcggaggcggcgaagggcaggatcatcattttgtcggcgttggcctccaccagcttctgggcgggcagggaatccaccaccacgcagtccacgcggccgttgagcagctccatgccgcaggcagtgaccgccttgaagcggctgactgtggcatcggggtaagtatcgctcaccagtgcgtcgccagtggtgccctcctgtaccgcgatcttggcggtagccagggcgtcagcggaggtccagttggcgggactgtcggcggcgggagcgccgctttctgtcacagggggcgtgctgccggcgggggtttcgttggtgtcgtcgctgcctccggagcaggcggtcagcaaaccgagggacagaactgcggtcaggccgagggcggccagcttcttacttttcatagtgcattctctcctattccttgtgtgccctgcgtgggcttttttgatgttcttattatacatcatattcataaaaatgcaatatttattcattcgtcaaagcacacaaaaaagaaagggcggagccatgcggctccgcccttttgtccaatcagagaggaatttaacccttggtagcgtggaagaacaggaagttgcccagcggggtgtagtacatgccgtggacatcgtccgccaccatgtaaggctgagagtaataatacaggggggcaatggcctggtcctcgcccacgagcagatcctcggcctggtgcatcagctccatacggccagcagcgtcggagtcgctcaggaccttggtcatgatggcgtcgtactccgcgttggagtagtgagcgtcgttgttgccgttgtcggtcatgaacatatccaggaaggacacggggtcgttgtagtcggcaatccagccgttgcggcagatgctgtagtcgcccttggtacgggtctccaggaacacgttccagtcctggttattcagagtgacctcaacgcccaggacgttcttccacatggactggagggcctcggccacggcctggtgcttgtcgtcggtgttgtacaggtaggtggtctcggggaagcccacgccgttctcataaccggcctcggccagcagcttccgggcctcctcgcagttggcctcatagtcgtccttggacacgctccagtagctgccgcccacggtgcggaagtcgtcgccggaggtaccctcggcgtctaccacgcttacgggcacccaggcgtcagcggcaatctcgccggcctgcgtcacttgctccacgatgtagttgcggtcgatagccagggagaaagccttgcgcaccaggggattgttgaagggctccttggtgttgttgaagcaggcgtagtagctgcccagatagtcgccggggatcacggtgccgtcagtcagcagcgtggccatctcatccgggggaggattctgcatgtagtccaggtcgccgttcttgaacgcggtgagctgggcgttggcatcgtccatcagcttgaaggtcagcttctccagggtgatgctggaggcgtcatagtagttctcgttgggcaccatgacgatctcggcgtcgtgggtccaggaggccatcttgaacgcgccgttggtcacataggtgctgggatcctgggtccaggtggcgttgccctccacgatgtcctcacgcagaggcatgcagttggggaacgcgcagatgtccaggaagtaagggcagttgtaggtcagagtgacctcaaaggtgtgctcgtcgggagcggcgacgcccagctcctccttgggcagctcgccggcgatgatctcgttggcgttctttaccatggcgataatggtgttgtagggagaggcggtggcgggatccaccaggcggcgccaggagtacacgaagtcgttggcggtcacgggctggccgtcagaccacttggcatcctcacgcagcttgaaggtgtaggtataggtaccgtcctcattcggagtgacagtgggctcctcggcggccatgccgggctccagcacggcggtagcaccgttgcgcccgtcgccggagggatcgctgtccacccacttgtagaggccctcaaacaggtgggtaatcataacgttgccgtccacagtacggttcatgctgggatccatggtctcgggctcggacgcgaagcacacgttcagctcgttcgcagcaccggtggtgccggtctccacgggagtgctcccctcgggagccggggtggtctgggtatctccggtgccgcagccggccagcagggacacggacagcgcagcggtcaggcccagagcaaggactctgctcttcttcattcgctttgtacctccaatcaattgtgatcctctattttgtaccaaaatgcccaaaagcattgatacactatgtatcgctgccccgttccggggcagcggacaggggtacccctgtccattgcaaaaatacatttgtctttaatagtctacattatagcacatggcagacgctttgtaaagccgcactttaccagatactgtctgctccaaatcacggcaaggctctgaaatcagcccagcagatgacagccagcccagtaaagtcacggacatttcctgcgggaaatgtgtcgcttcgcttcaacgccgcgccttccagggggaaccagttccccctggatacgcgcctgcggcgcgataccccctccgctctccgagggggaccgaaaccgaccgtcacgtagggcgggggcttgcccccgccgtcggcaaaaccactgtgccggaacctcgcttaccccagcaggtgacacgcggcccagtaaaggcgcggacatttcctgcgggaaatgtgtcgcttcgcttcaaagccgcgccttccagggggaaccagttccccctggatacgcgcctgcggcgcgataccccctccgctctccgagggggaccgaaaccgaccgtcacgtagggcgggggcttgcccccgccgtcggcaaaaccactgtgccggaacctcgcttaccccagcagatggcacgcagcccagtaaaggcgcggacatttcctgcgggaaatgtgtcgcttcgctccaaagccgcgccttccagggggaaccagttccccctggatacgcgcctgcggcgcgataccccctccgctctccgagggggaccgaaaccgaccgtcacgtagggcgggggcttgcccccgccgtcggcaaaaccactgtgctggaacctcgcttaccccagcaagtgacacgcggcccagtggccgggcgcgtgctccttgaactccggcacggcctccttgcacttgtcggtggcgtaagggcaacgggtgtggaaccggcagcccttgggcgggtgcatgggggagggaatatcgccctccagcacgatgcgctggcgctggcggctgacctcggggtctggcaccggaacggcggaaagcagggtcttggtgtaggggtggagaggattcttgttgagctcatagctctcggccagctccaccagggagcccaggtacatgacgccgatgcggttggagatatggcgcactaccgacaggtcgtgggcgatgaacagatacgtcaggcccagctcctgctgcatgtcctccagcatgttgaccacctgggactggatggacacatccagagcggagatgggctcgtcgcagacgatgaactcgggcttgactgccagggcgcgggcaatgcccacgcgctgctgctggccgccggagaactcgtggggatagcggtttgcgtgctcggtgttcaggcccaccatgcccagcagctctttgatccggtcggtgcgctcggcttttgaggagcagagcttatggatgtccagagcctcgccgatgatctcgcccactgtcatgcgggggtccagagaggcggaggggtcctggaagataatctgcatcttgcggcggtagggcagcatattgacctgcctgcacttgggaaccttgacgtgctgcttctcaccgttctcaccggcgggccagggatcctgtccctcgaaaatggtttcgccgccgtactcgatgcggccggaggtgggggtgtagagctggagaatggttcggcccagggtggtcttgccgcagccggactcgcccaccagacccagggtctcgccccggcggataaagagggacacgtcctccaccgcctggacgccgggcccatgaacgcccttgaccggaaagtattttttcaggtggtccacttgaaccaggatgtcattcttctcactcacggccgctcacctcctgatcctgtaccggcttctcctgtccggccttgtcgagctgatcctgcacccgcagccagcaggcggagcggtggccctcgcccagctccacgtaggggggcatcttctgcaggcagatcttcatggcatgctcacaccggggggcgaaggggcagccctcggggggattgagcatgtccacgggcgtaccctcgatggggatcagccgctcatagctctcggcgtccacgcggggcatggagcgcagcaggcccacggtgtaggggtggccgggcttgtagaagatgtcgtccaccggcccctgctccacgatcttgccggcatacatgacggagaccttgtcgcagatctcagccaccacgcccaggttgtgggtgatgaagataatgcccatgtgagtcttcttctggagctccttcatgagctccagaatctgggcctgaatggtcacgtccagagcagtggtgggctcgtcggcaatcagcagcttggggtggcagatgaggcccatggcgatcatgacacgctggcgcatgccgccggagaactcgtgagggtactgcttcatccgcttggccacgttgttgatgcccaccagctccagcatctccatggcccgcttggcggcgtcggccttggagattttcttgtcgtgggcccgcagggcctcgatgagctggttgcccacggtgtaaacgggattgaggcaggtcattgggttctggaaaatcatggccacctcgctgccccggaaggaggccatctccttcttgctgaaggccagaacatcccggccctcgaaggtgatggaaccgccgatgaccttgccgggggactggagcaggcccatgatggagtaagcctcctggctcttgccggagccggactcgcccacaatgcccatgacctcgtcgtaatccaggtcatagctgatgccgctgacggccttgacctcacctgcgggggtaaagaaggagacccgcagatccttgacttccagcagcttgccggacttttcgttctgttccattgattgtctcctcctctcttatttcttcagacggggatccagggcgtcccgcaggccgtcgccaaacaggttgaaggacaggatcataatgctgatgatgatagcgggaatgatcaaacggtaggggtaggtgctgatgccgcccagcgcgtcggagcacatggagcccaggctggtcaggggagccagcacgcccacgcccaggaaggacatgaaggactcagtgaagatggcggacgggatctgcaggcaggtggtggccacgatctggccgatgcagttgggcagcaggtgccgcttgatgatccggccgctggaggcgcccagggcacgggccgcggtcacgtattcctgtttcttgagggtgaggatctggccgcggatgatgcggctcatacccacccaatacaggcaggcaaaggcaatgaacatgcccatcaggttggggcccaccttcttaaagaactccgccaggaagaagccctggtggtcggtgatgaactgggtgacatgggggcccatggccgtggcgatgagcaggatgatcagcacatcgggcagggagtagataacgtccacgatgcgctgcatgaccacatccaccgtaccgccgaagaagccggagatggagccgtagagcgcaccgatgaccagcacgatcagcgcggcggtgaggccgatgatcatggacacccgggtggcaaacatggtgcgcaccatgatatcgcggccgtagcggtcggtgccgaacacatgggggaacaccttctcgccgtcggcgatgcgctgcagctcgtcgttggagtagccgaagggctgggcggagtagcccagggccttgtagatctcctcctcgctcataccctcgtactcggcgccgccgccggccttggcctgggcgcggatgagcgccttgtccttgctgctgagctcctcgccgcgggcggccgcctccgcttcagcggcggcaacggcctcgtcggggtcctgggaggaggtggcctccttataggcctgttgggcctcaagggagtaatgccaggggtagaggttctctgcgccggcgttgaactggtcgtatccgtagggtaccagcatggggccaacaaaagcgaacagcaccaacagtacaatcacgcccagggccaccatggccaccacgttcttgcgcaggcggcgccaggcatccgcccagtaggatacgctcttgcgctgctggatgaagtcctccttctccccgctggtagccggggcgaagtccgccgccgtcaggtcgttcagctccagcagggggtccacatcgggctgaagggagccaaagacagcttttttctgtttctctgccatttttactctcctttcgtcagatcgatgcgggggtccaccacgcggtagaggatgtcaaccaccaggttcatgatgaccaccagggtcgccaggaagatggtggtgcccatgatgatgaagtagtcgcggttctgcacggactgcaccagatagcggcccaggccgggaatggtgtagacggtctccaccacgaagccgcccaccagggtgaaggcggtcagggggcccaggtaggtgatgacggggatgacaccattgcgcagggcgtgcttgaagatgatcctgggagtcagcaggcccttggcccgcgcggtcttgatatagtcctggcccagggcgtccagcatggaggagcgggtcaggcgggcaatatagcacatggggtaaaggcccagggccagacagggcatcagataggccttggccccctgggaggcgtcaaaaataacgttgatgcccatgaatttaaagggcgccccatcattgcagaaaagcatcagcaggaaggtggccaccacgaagccgggcatggacacacccagggtacacaccacccgtaagacgctgtccacccattttccccggttgtaggccgccagacagcccaatggtatgcccaccgccacggcccataccagagcgatgacgccgatctttgcggagagggggaacttctccgtgatgatgtccagcaccggacggtccttctgcatcttcagggagacaccgaagtcctggtccacgatgactcccttgaggtagcgcagcatctgaaccccaagggggtcgtccatcccgtacttggcctccatggccgccttctgctccggcgtaatcttttcgtcgttgaacgggctgcccggcacggacatcatcaggacgaaggtgacgcaggcaacgaccagaatggtgatgagggccatgatcacccgtttcacaatgtattttgccattctttcacttcccatattattctctgttcacgcaatcgaaactgccccatcgtaagcgtttctccattttatcgtaatttgtcccatgcgtcaagagtatggccctccaaatttgatggaaactccccctaatcttgcatgtgtccttcatacaaagacaattttccgcttatctgtccacatattatttcgctgtcagacgcttttcgagttgtgccagccaaaaaaccgccttttttcatagtgtggaatttaaatattccgtatattattcacctattcgccctttttatgcaatttcggccgggcatgcaattcccaccgcttgaatcgcttttctgcataaattgcaaaaaggcgggcacggaccgatgtccgcgcccgccatgggctccgctcagtcgaagcccaggcccatatagccgtgggtgccctccccccagagcgcccgcttttcggcgctgtaccacttaatcataccgaagggctggaggtagctacccttcatgccatcccatagtgcaggggtgcgcacatagcagcgcgccccggggagcacccgttccagcgccgccagcccgcggcccatcttgtccggggacagcagcagctccttgaacagcacactctccccgtcggtgtactcggcggcggcgcagccctccgcgccgtccacgctcaaccggtacagcccgccccccgacaggcggcccatgccctgctggtagcggatcagctcttccgggtagtccacggcgggcgccccctccagcaggcggcgccggatggtgttgtactcccccggctccacgggttctgcccggtcgccctccgccgcgggctggagcatgctcttgagcagctccagcttccgggtggaaaagcagggcgcaaagcccaccgtcccgaagaatttgaacaggcttggctcggcgggcacagtggtaacgcagtccgctccccgctcggccagatagccgtccacgaagcggagaagctgccggccgtagcccttgctgcgcgccccggggtcggtggccagggcgtagatataccagcccgaggcggttccgccgccgggcagggtcaacgtctggggcagcagggccagcatggaggccagccgcccctcctccaccacctcaagaacgtcggctgaggccccgcagcactcgtagaaccagtcgatatagcggtcctcgtccccgaaggccgccttccacagcgccttctgggccggaacctcctccggacggccgggacgcatctccaacataagctgctcctttcttatcgcttcaaaaaccgtcacttcataaccgccgtgtgcttttccaccatcaggtcggggtaatagctctgcttggctttgcgcaggccctccacgcccatgtcgtcctcccggttgaggtaccggatctccgggtggcgggcccgcacccagcgggcgaactcccggttgatcatggcgtaggccccctgaagctcgccgtaggccttctcgaagtgcacgtcgtaggtgtcggcggacagcctgtcaccgatggtgaaggccaccacctcgccgtatacccggatgaggccgccctcaaggcccagctcctcatagtgctccatggcggtgcgcagggcaattccctcgtctcccagatcccgctcctcggcgtctccctcccgctggagggagcggcggtaccactccttgtccatctccaggcactcgggcagggtggccggggtgatctcctcgtaggtccaggtggggttgttctctacaaagcggttgatgtggttgcgcttggcgtggagcttcttgccccccagctcggccagccgctccacctcgtaaaggtagtcgtagccgtcccggtccgcggtgtaggcgaaccggccggggaaaaattcctccagctccgccatctgccggggcgtgaggcacaccaggcgcaggggctcccccttctccgccgcgtcggcctccagcgcacggatgacggcagcaatgtctccggagcccgcagggtacatatagctgcaccccaggcggccgcacacatgggtcaccagaaaatcgtccacccgggcgatgcgctggttataggcccggctccagacgtagagattggtaaagttatagtcgcacccccggtagttgccccgggcgagcagttcatccacccaggccttgtccgccggggtgggcgcatggaattcgatcatgcaggtttcgtctccttaaattcctagtatgccgaaatgatatcacgcccgtccgcaaatggcaagcaaaacccgtcaggcaccgtcccaccggcagccgcccagctccacccggccgtcggcggtgaagggcaccccctctgcctccagtatcgcccgctggacgccggggccaaatgctggggtggtggagccgtcggcacgcaccacccggtggcagggcacgccgggcgtgcggcaggcccgcatggcgtagcccaccgcccgggaggccctgggattgcccagcatcagggcgagctgcccgtaggaggcgcacttccccgccgggatgcgccggaccagctcatagacccgctcataaaaattcatgtcaatgcctcctccgaataccgataacagaagcacggcggccgcccgaggggcggccgccgtaccgtattttccgttgtcctcaccagccggggtagacctggctcttcttgggcagcagcagggccgccgccacatagagccacagccctgcggtgcccgcgaagcacagcgccacccagatgaggcgcaccaggttggcgtccacattaaagtactcggccacgccgccgcacacgccagccagagcgccgtgatccagccggtacagcttttttgtctcgttcatctgaaaatcctcccgaggtgatttcgaattctggacataggataccacgggaggggttaaaaagtccttcgggctttcttaaaaatccatgaaaattatttgccgtcctccaccagcatgaggcagccgtcggcgtcgtatctgagccgctgcacctccgccttggtgttgcgcacgatatcgtccatgcggatgccctcggtgatggtggcgatgaaggtgtaggccacgccgtggcgcttggcccggccggtgcggccgatgcggtgggtgtagttctccagctcgtcgggcacgtcgtagttgaacaccgcgtccacgtcgtcgatgtccaggccccgggcggccacgtcggtggccaccagcaccttgatctcgccccgcttgaacttctccagggtcttctcccggatgcgctgctgaatgtcgccgtggatggcctcgcaggagatgccccgcatcttcagcaggccggccagccggtcggtcatgttcttggtgttgcagaaggcgatggcccgctcgtactccccgtgggtgatgagggccgcgatggtgtccagcttctgctcccggccgtccagatcaatgcggtactgggtgatgtccggcttggactcctccaccgggcggacggtgatctccaccgggtcccgctggtacacccaggagatgtccatgacctcccggctgatggtggcggaaaacatgcccaggtttctgcggtgcttgagctggtccaggatacgggtcacgtcccgcacgaagcccatgtccagcatccggtctgcctcgtccagcactacggtctgcaccttatccagccggacggtgcggcgcttcatgtgatccatgaggcggccgggggtggccaccacaatctggggcttctttttcagggtgttgatctgcttgtcgatgggggccccgccgtagaggcagacggtgcgcaccccctccttgaactcgcacagatcccgcagctcctcctggatctgcaccgccagctcccgggtgggggccagcaccaggccctgcacgtcggcgcattccgggtcgatgtgctccaccatggggatgccgaaggcaaaggtcttgcccgtgccggtgggggccttggcaatgacatccttccactccatgaaataggggatcgcccccgcctggacgggggtggcctggacatagcccttcttttcaatggccctcatgatggcctcggacagccccagctccgcgtaggttttggtcccgttcacctgctcgccgttgatttccattcgggtacaaacatcctttcgtttcgttttgcctgattcaaggtccccacaggcagccgaaaccccgtttcgtacccaaacgcccgcctcaccgcgggggcgcgacctcaaatccatcggccggaagcggctccggcctgtctcgcgccaatactatatcatagccccgcccattacgcaagtgcgccgccgctcccgccgtgctcctccgcccagatctccagggcctcccgggccccgtagaggctcccgcggtaaaagtagtagcggctgctccggcgggcatagcggcggtagacctccagatactcgttcaggaggtaaaccccctccgcctccagccagggcagcagcttctccagcgtgcgctccatctccgtcaaaagggccgtgtcctcggggccataggccccctttccctcgccgtagggcgggcacgcctcaaaggccgattcccagtcattcaccatcttccccgtcctccttcatattctccagcgccacccgcgtcgcctcaattacaaagcgggaaaacgtcacgtttgtcccctggatcacctcgtccacctgctgaataatttcattgggaaaacgtatgttcttgggcgttgtctccggaatggagggcagttgaaattttcttcccatacaaatcaccatctctactgtatggcaatctgtgggctttgtaagcactacatattgtaaggcaaatcgtaaagcacggccgctcctctccgcgtaggggcgacccttgtggtcgcccgcgggcggccataaaggccgcccctacaagggcttgtcaccaccgtcggcctttcgtaggcgccgatgcccacatcggcccgccctgcaccgtgtcggcgcgccttccatactccccctctttatatctgctttcttgtcatgcctccggcggccccgctttcttgccgaagaaagcggggggaaagacgggtcggggcgggggattccgatttcccccgccccgacaccccaccccttgaaacggccaatcaggggggctgcggcccccctattggatgtaccccccaggaagggagggtatgccagcccatccggagcggcgggggcgttacaacgtaagcccccgccgtcggaaagccgccagcaggacggctcgggggaaactccaagaagggggaatcgcaattcccccttcttggtcgtttcaagggggatgggcgttgggaagggggaaaatcgaaattcccccttcccaaccggctctttcgcccctttctggccgctcagaaaggggcccgccggaggcttgacaagaaagcaggtgtcaaaaagggttcccatggaaggcgcgccagcccggcataaggcgggccgatgtaggcagaaggtgaattgcctcagagaggcaaaagaggccgcccctacagttgaacgcacagcacataaaacccagccagtgtccggtccctacctgcgccggaacacatggacgcggaaggaggcccgcacccgcaggccgtccagggcggccagccgctccgccccctccctgggggtcttccagtaatagggggtcatctggaacaggtcgcgcaacgcctcccccgccacgtccaccaccgcctccaccggctccacccgctcgtaggagaagccctcgtaggggacgtcctcctcccggttgcggtagggctgttcgtagagcacctgcttgagctcccacaggtggtcggcggcgggcaccacatagaggaaggccccgccggggcggagcacccgccggaactcgtccagggccaggggggagaagcagttgagcaccagccccaccgaggcatccgccagaggcagatggtaggcggaggccacggcgaactccccctccggcacccgccgggcggccaggcgcaccgacggcttggacaggtcgattcccgccaggggcgggcggcctagggcctcccacagtccggcggtgtagtacccctcgccgcagcccgagtccagcaccgcctcccccggcggggcgtactccgcccccagggcgcacagggcggccagcaggtggccgtagtatcccccggagagaaaccggcggcgggcctccgccatgcccttgtcgtcgccgggggccttggagtgctttttgttggcgggcagcaggtggacatacccctctctggccttgtcgtaggcgtggccgttggggcaggcataggcccgctccccccgctccaggggggcggcgcagatggggcaggtaaacagagacttttccacagaacctctctcctttgtggaaggtatggcaggaaattgggcccccgcacgggcgggggccccggccgctcacccctccagcagctccttgccggagatgccgggctccgtcatggagtagggatccagaattttgtccagggccgcctcgtccagcaggccctcctccagaatgagccgccgcaccggcgcgccggtctcgatggcccgcttggccacctcggcggccttctcatagcccacgtgggggcacagggcggtgatgatgcccacgctgtgctccaccatgtcccggcaccgctcccggttggcggtgatgccggtgacgcagttgtccacaaaggtatgtaccgcgtaggtcagggtctccacgctctggatcaggttgtagaagatgatgggctcgaaggcgttgagctccagttggcccgcctcggcggccatggtgacggtgacgtcgtttccgatgatgttgaaggccacctggctgaccacctcggggatgacggggttgaccttccccggcatgatggaggagccgttctgccggggcggcaggttgatctcgctgaagccgcagcgggggccggaggacatgagccgcaggtcgttggacatcttggacaggttgacggcgcaggtcttgaccgcgccggacacggccacgagcccgtccaggttctgggtggcgtcgatgaggtcgaaggcctgcaccagctcaagcccggtgaccttggacaggttggggatgatgcggcgcagataccgctcgtcggcgttgatgccggtgccgatggcggtaccccccatgttgaggcggcgcatctcgtccttggcccgctcgaagcgggcgatgtcccggcgcaccacccggctgtaggcccggaactcctgccccagacggatgggcaccgcgtcctgcatctgcgtgcggcccatcttgagcacgtcgtcaaactcctccgccttggcctccagggcctcagagagccgctcgagctggatctgggcccgcaccagcagcttgagcaccgccagcttgcccgccgaggggaacacatcgttggtggactggccgtagttgacgtggtcgttggggttgaccagggcgtagtcccccttctccccgcccagcagctcgatggcccggttggcgatgacctcgttggcgttcatgttcaggctggtgcccgcgccgccctggatggggtccacgatgaacgcctcgtggagccggcccgccgcaatctcatcgcaggcccgcacgatggcgtcggccacccgcttgtccagcaggccgatctccaggttggtgatggcggaggccttcttgatctccgcgatggagttgatctgctccggatgtacggccagcccggtgatggggaagttctccgccgcccgcagggactggacgccgtagtagacgtccttggggacagacctctcccccacggagtcgtgctcggagcggtattggatgctcatggtacaggcgcctcctcgcaagcagtccttcattttatagggacatcatagcaccatccgttttattttgcaagcaatcctgcaaattatagtccctctccgtgccatgggcaggtcaccagatggtcattgatgagccccgccccctggaggtaggagtagacaatcaccggccccacaaagcggaagccccgctttttcaggtcggcgctcacccggcgggacaggtcgtcctcggcgggcatgtcctccggccgctccagccggtggtccaccggcacgccgtccacccagtgccagaggtagcgggcaaagctgccccactcctccgccacggccagaaaggcccgggcattggtgacggcgcagcgggccttgctcctgtttttgatgacgccgggggcggccagagcggcctccacctcgtcctccccccacccggccagcgccgccggctcaaaatccgcgaaggccgcccgcagggccgcccgccgctccagaatcagcttccagctcagcccggcctgaaagccctccagctccagcagctcgaacagcgcccggtcatcccggcagggccggcaccactccgtgtcatggtacaaaatctcgtgctctgtttttgcccaggggcagcgcgcgccctctcccatgtcagctctctcctctccttccccgcccggttgggccgggaaacgcgatatcatctgcactatagcatagaaatagggaaatggaaacccgccggcaaagtcattgctgagaaaaaattttgtaaataaagaaaaaatcaggtgacttgccaggcggaccgtgttaccattaagataccagccaggggacatggcctggcaaatataaaatcaggaggacccctctcgtatgaaaaagcaccgcggaagacatctgctctccctgctggcgtcggcagctctgctggcatccctgctgcccgccgcctttgcggctgaggcagagggcgagaagcacatcaccatcctgggcacctcagacatgcacggaaatatctggggctattcctacgaagacaacgcggagaccgacaacaacggcatggccaggctctacacctacatccagcaagtgcgggccgagaaccccaacaccttcctcgtcgacgccggcgacgacatccagggcaccatcatgaccgacgatctgtataacaagaccccggaggagccccatccggtcgtcaccgccatgaactacatgggctatgacgccatgaccctgggcaaccacgagttcaactggggcatccccaccatgcaggccattctgggacaggccagcttcccggttctggccgccaacgtcaccggcgcccagggcgagccggtcaccggcgcgggctggacgattgtggagcggggcggcgtgaagctggccgtcatcggcgtggtcaccccggatgtccccatctgggacagcggcaaggacggcattgacgacgccgtctatgaggccgccaacgtggccgtcggcaaggccatcgacgagatcggcgaccaggccgacgtaatcatggtgtccgcccacatgggcatgtacgccgaatttgacgaggagggcggctccgactccgcccagaagattctggacgacaacccggagatcgacgtgctccaggtggcccacaaccatgtggtggtcaacgagaagcagggctccaccgtcatcggcggcgtgcgcaacggcggccgggacatcgcccgctttgatctgaccctggacgccgacaatcagatcattgacagctcggtggagattgtggatatgaccggcgtgacccccagccaggagctccgggagatccccctggtggccgaggcccatcagaagaccatcgactacatcaacggcggcggctccggcgacgagggcgagggcggcgcgtccctgggaagcactaccgcccgcttccagcctgagaacgagatccgcggcatccccgccggccgggtgatggataccgccgtcatggatctgatcaacaccgtccagctggagaactccggcgccgacgtctccgccgccgccctcttcaagggtaccagcgatctgcccaagggcgacatcaactacggcaacatcttcgacatctacaagtttgacaacaccctttaccgggtgagcgtcaccggcgcggagctcaaggcttacatggagtggtccgccgagtgctacaaccagtggcaggagggggatatcaatatctccttcgaccccgagtaccccgactacctctacgatatgtttgccggcgtggactatgagatcgacctgtcccagcccaagggccagcgcatccagaacgtcatgttccacggcgcgcccctccaggatgaccaggagctgaccctggcggtgaataattaccgctactcctccgccctgaaggcccagaacatcatctccggcaccaaggagtgggagtcctccaactccatccgggatatgatcgtgacctactttgccgagcactcccccgtggcccccgaggtggaccacaactggaagatcgtgggcgtggatctgagcgaggacgacccccgccgggcggagctggtgggctacatcaacgccggcctgctggacaccccctacgccgagagctacaacctgtccgactatgattccctggtggcccaggccaaggcgaaggccgagaccctcaccgtgaccgtaaacggcgcggccaaagacgtggccacggctttcgacgcccaggggaatacctactaccgcctgcgcgacctcgcctttgccctgaagggcaccggcgcccagttcaatgtgacgtgggacggcagcgtggccgtcgccaccggctccgcctacgagggcgaggccctggccatgcccggctccgcccccaccggcgaggccgtcagcctgactctcaccgtggacggcactgcggtgagccagcccgccgtactcgtcaacggcaactactatctggccgaaggcttcctcgcccagctgggcgcggagtccgccctggtggagggcgttttggccatcaccgccgcgtaaccgctttccgtcagcaaagggccgcgcctggggcgcggccctttccttgcgtattttaccggactccgccagagctttgaacgatccattcccttcatacggccgtcttgtccaatttttctctggcccctttgagcaatctgtgatataatccgctccgtatgatgattttcgcataaaaaggagtacgacatgattacagtttccgacctgggcctggcctacagcggccagcccctcttttcccacgtggatctccagttcaccaagggcaactgctacggcatcatcggcgccaacggcgcgggtaaatccaccttcctgaaaatcctctccggcgagctggagcccacctccggcgaggtctccatcctgcccaagacccgcatgtcggtgctcaagcaggatcagaacgcctacaacgcctacaacgtcatggacaccgtcatcatgggcaaccagcgcctctacgacatcggcaaggagaaggaggccctctacgccaaggaagagatgaccgaggccgacggcatccgcgcctgcgagctggaggaggagtacgccgagctgggcggctgggaggccgagagcgacgccagccgcatcctccagggcctgggcgtgggcaccgagttccactacaacgacatggccaccctggacgcccggctgaaggtgaaggtgctgctggcccaggccctgttcggcagcccggatatcctgctgctggacgagcccaccaacaacctggatatcaacgcggtgaactggctggaggacttcctgctggactttgagggcacggtgattgtggtcagccacgaccgccacttcctcaacaccatctgcacccacatcgtggacatcgactacaacaagatcaagatgtacgtgggcaactacgacttctggtacgacgcctcccagctgatgcagaacctgatgaagaaccagaacaagaagaacgaggagaaggcccaggagctcaaggagttcatctcccgcttctccgccaacaagtccaagagcaagcaggccaccgcccggcgcaagctgctggagaagatcaccctggaggagatccccgcctcctcccgccgctacccctgggtggccttctctcccgaccgggaggtgggcaaggacatcctcttcgtcaccgacgtcagcaagaccatcgacggggtgaaggtgctggacaaggtgagcttcatcgtgggccacggggacaagatcgccttcgtgggcgacaacgagaacgcccagaccgccctgttccagatcctcaccggcgagctggagcccgacgagggcaccgtcaagtggggccagaccgccaccttctcctacttccccaaggacaacaccaagttcttcaaggactgcgacgacaatctggtggagtggctgcgccagtggtcctccgacccccacgaggcctatctgcggggctttttgggccggatgctcttctccggcgacgaggtttacaagcccgtcaaggtgctctccggcggcgagaaggtgcggtgcatgctctcccggatgatgctctccggggccaacgtgctgctgctggaccagcccaccaaccacctggatctggagtccatcgccgccctgaacaacggcctggaggccgtcaagtgcaacgtgctcttcgcctcccacgaccaccagcttgtgcagaccgtggccaaccgggtgttcgacttcacctccgacggcaagctcattgaccgcaagatgacctacgacgagtacctggagagccagaaggccgactgattgaccggaatagcaaaaaccgccgcggactggcgttccgtccgcggcggttttttatccctccggcgcgcaggctgtttccgccggaagtggttttctccggtagagcaccagcccggccagatcggccagtacccagccgatgggtaccgcccaccagatgcccttcaggcccacggcggggatgggggccagcaggtaggccagggccacccgcgtccccagggagaccacggtgagcaccaccgacacgccgggccgccccaggccgcggaacaggccgtagagcaaaaacaggatgccgatgccgcagtagcacatgccctcaatgcgcaggtactccacccccacggcgataatctccgtctcgccgggctccacaaacaggcccatgaggggggcggcgaagaggcacaccagcagggagctgaccaggcagaagccgatggacacccccacggcggagcggatgcccctccggatgcgctccgccttctgcgcgccggtgttctgggccacgaaggtggagaaggcgttgccgaagtcctggacgggcaggtaggcgaaggcgtcgatcttgacggcggcggcaaaggcagccatcacgttcaccccgaaggagttcaccagcccctgcaccatcaggatgccgaagttcatcaccgactgctgcacgcaggtgagcagggagtagttcatgatacgccccagctccccccgggacaccttgcagtgccgccgctccagccggagcaggggcacccgccgccagccgtagagggcgataccggcggcggacaccccctgggcgagcaccgtggcccccgcggccccggccaccccccagcccagtcccaggacaaaccagagatccagcccgatgttgaggacggtggacacggccagaaaggccagcggggccacggagttgcccaccgagcgcagcaggcaggcgaagtagttatagaggaaggtgaagcagacgcccagcagcaccacccgcaggtaggcccgggtctcctcccaggccccggcgggaatgcgcagcagggtcatcaccggctccagcagggccagcacccccacgttgagcagcaccgccacagcgccgatgaacacaaaggaggcgaagaggcagcgcttcagctcctcctcccggcccgcgccgtagagcatggaccacagggcgccgctgcccatgcacaggcccagcagcaccgaggtgagaaaggtcatcagggtaaaggagaagcccaccgacgccagggccgacgcccccagcgcccggcccacaatgagggtgtcggcgatgttgtagcactgctggagcagattgcccgcgatcatgggaccggcgaacagcagcatagggcgggtgattccaccccgggtcaaatccatctgcattggctcacgcactttcgttttgaatgttttatctttcttttcgtaagaatcatagcaaatccagaggaaaaatacaaggctatacttgccttttttcttcagccgggataagataacaaacacagcttgacagatagagggggcggaggcgttgtttttaagtggtctggacgacatcgaccggcggctggtggagctgctcatccacaacgcccgtatgtcctactcagatctgggccaggcggttgggctgtcccgtgtggcggtgaaggcccgcgtccgcgccctggaggagcggggcgtgatcgaggagtacaccaccattgtcaatccccagaagatcagcggtgctgtgtcctgctactttgagcttgaggtagagcccgcccaattcagcgcggtggtgaataccctgcgcgccagcgataccgtgacccagatctaccaggtgtccggccgcaacaagctccacgtccacgccgtggcggctggccagtgggaactggaggactttctggaccgggtcatccaccgtctgcccggcgttgccagcctgagctgcaacatcatcctctcccgcatcaaggacatcaagggcctgcgcctgtaagaaaaatcgtgcactttccgccaaagtgtgctatactatgaatttgaactcatttcatccggaaagggtggttttcatgcgaaaagaaattctgctgcccgccgtggcggtggctggcggtggggtcggctttgtcctgcgccgctgggagctggccacggcctttgagtcggacaccggcttacccattcccggcgccccggccactctcgccctcatcgccctttcggttgccatggcggcggttctggccctgctctgccggggcaaatacccctcctttaccggctacgacgaggcctttcaggccaagggaaacaccctgtacgccaccgctatggtgctctccgccttcctgctcttgggggcggcggtgctgatggtgctctcctttgtccaggggaccaacaccgtctacacccgcctgctgctggccgccctggcggcggtctctttcttctgcgtaatgcagacggcgcagaacagcttcaagggcctggacaggggcaagtacagcttcaccctgctgatgcccgcctacacctgttgcgtgtggctgatcgccgcctaccaggtgcgggccggagatccggtgcagttggactatgtgtatgagcttttcgccatcatcgcctccctgctggggctctacttccacgccggcttctcctttgagcggggccgggtgttctgggctgggctgttctccctgctggggatctacttctgcctgaccaccctggccgaccagcacgatctggccacgacgctgctctatggcttcgccatcctctatttgctctcgtccacggtgacgcttctgtacaatgccggccggccggagctcctggcccgggccgaaaacgatacgacggagggaacgcccgatgaatcctgagaaattctatattaccaccccgatctactacccctcggacaagctgcacatcggccacacctactgcaccgtggccaccgacgccatggcccgctataagcgcctgcggggctgtgaggtcatgttcctcaccggcaccgacgagcacggccagaaaatcgaggacaaggccaaggaggccggcgtatcccccaaggagtttgtcgaccacatcgtggagggcccccggggcgtgctcgacctgtggaagctgatgaatatctccaacgaccggttcatccgcaccaccgacgattaccacgtggagtccgtgcagaagatcttcaagcagctctatgagcagggggacatctacaagggcaaatacgtgggcaagtattgcaagccctgcgagtccttctggacggagacccagctcaaggacggcaagtgccccgactgcggccgggacgtggtggatgccgaggaggaggcctacttcttccgcctgtccaagtacgccgaccgcatccggcatctgctggaggacaccgacttcctggagccccgcagccgggtcaacgagatggtgaacaacttcatcaagcccggcctggaggatctgtgcgtctcccgcacctccttctcctggggtgtgccggtggacttcgaccccggccacgtggtgtacgtgtggatcgacgccctgtccaactacatcaacgccctgggctatgagaacgaccgctaccacgactttgagaagttctggcccgccgacgtgcacttcgtgggcaaggagatcgtccgcttccacgccatcatctggcccgccatcctcatggctctgggcctgcccctgcccaagaaggtgtacggccacggctggctgctgctggacggcggcaagatgagcaagtccaagggcaatgtggtggatccctacctgctggccgagcgctacggggtggacgccctgcgctacttcctgctgcgggagttccccttcggcaccgacggcaacttctccaacgaggccctcatcggccgcatcaacaccgacctggccaacgacctgggcaacctggtcagccgcaccaccgccatggtgggcaagtacttcggcgagcgcctgccggaggactgcggcgccaccggggacgagctggagctggccgccatgctggcccaggcccagggcgaggtgaacctctccatggactttccggaggacgacccccggaagtacgacgtggagctcatcgccctggccgccggcctgcggggccgctacgaggcgcagatggagcactacgccttccaggacgccctggtggaggtgttcaagctcatcggccgggccaacaagtatatcgacgagaacaagccctgggcactggccaaggacgaggcccagaagccccgcctggcccacgtgctctacaatctgctggagtgcgtgcgcctttccgccgtactgctcaccccctttatgcccgagacctgcgggaagatcttcgcccagctcggcgtggacgagggcgcgcgcacctgggagtccgccggagcgtggggcctgctccccgccggcgcggcggtgagcaagggggagaacctgttcccccgcatcgacgtggagaaggagctggccgccctggacgagctacaggccgaggcccgcagggccgccctccccgccgtggaggtggagcccttcgcccaggagagcgtggacttcgacaccttctgcaagagcgatttccgggccgtgaaggtcaaggcgtgtgagagcgtgaaaaagagcgccaagctcctcaggttcatcctggacgacggttccgggactgaccgccagatcctctccggcatcgccatgtactacaagccggaggaactggtgggcaagaccctggtagccattatcaaccttcccccccgcaagatgatggggcaggagagctgcggcatgctgctctccgccgtccacaccgagcacggggaggagaagctccacctggttatggtggacgacgctatccccgccggcgccaagctgtgctgagcgcatcctgtataaacagagggggcgcgcctgcgtttgcaggcccgccccttgctgttctctatcccctgtcccggcgcagcaggcgccggaagctcaggtcgatggccagggcccccaagggggcagtgaccaggatagcgactaccgccacggtgagcaccacctgcccacaggccaggcccatggccagagggacaccgccgatggcggcctgcactgtagctttgggcagataggccagcacggcaaacagccgctcccgtccgctcaggcggctccccgccacgcagaggagcacccccacggcccggaaacacagcacccccagcaccgtggccacggcggccagccctgccgccgcggcgtagccgatgtccacctcggcccccaccaggacaaagagcatcacctcggccgccacccacagcttaccgaacttggcagtgagccgctccgccgccggcctccgccaacggcgcaggcccaggcccgtccccagaacagccagcagcccggagaaggggaccaccccctccgccgcgtcctccagggcaaccagcaggaaagccagcgccagcagcaccaccaccttggccgagtcccgcaggtggaagcgggtgaagcatttagccaggacgtatcccagccccaggcccgccgccccacccagcacaatggataccggcacccccgccagggccgcaggggaaaagctgcctccctgagccatgccggtaaaggaggtaaagaggacgatgacgaacacatcgtccaccgaggccccggcgagaatcatctgggggatgcccttgtctgcgccatagccctcctccatcagcctgagcatccggggaacgatgaccgcgggggacaccgcccccaccactgcgcccataatggcggcgtccaacacgtccacccccagcagccggggagccagcagcaccatgcccagcacctcaaaggaagcgggcacaaagcacagcagcacggcgggccgcccggcccggcgcagatcctccagctccagggacaggcccgcccgggtgaggatgatcaccagggcgagctgccgcaggtctgcggaaatacctaacagggatgggctgagcaggttaagtacgcagggccccagcagaatccccgccagcagcatccccaccagggacggcaggcggagcctgctggccatggcccccagggccatgcccagcaacagcacataggcgagactggttaacataacaaatcattcctctccagagggcagaaaaaaagccaatgccccctgcaatctcttgcagaagtcatcagccaagcggcggttcgggccagcgccccgggagaacctcattcccgtgttccggctgctatcctaccatacatcccttcccctgtcaagaccgcctttttcgatatccttagagattccttagaattacctgctatcctgtggacagaccacaaaaaggagctgtccgcaatggaaacacatcatatcacccccgcccgggggttgtccgagacggggctgaaatggatcgccctggtcaccatggtgttggaccacattcactactttttcagctttaccgggtgcgtccccgagtggttcagtatggtggggcggctgggcgcgcccctgttcctgttctgcctggtggagggcttcacccacacccacagccggaagcggtacttcgcaagggtctacgtcctctccaccgccatgtctctcctgttcttcttcatggcctttgcccacgtgctggtgcggcccgacgggttctaccccgccaacggcatgatgaccacctttgtgattctcatggtgatgttccaaggcatcgactggctgggccggcggcatattgtccggggcctggcggcgcttcttctccccctggcctggcccttcctggcctccgccctctccctggccgtccccgccctggccacccccgtgggcctggcggcctactccgttctccccgcctggggcaccaccggggacagcagttggccggtgctggccatggggctggtgctctacctgttccgccggaaccggagggggcaggtactggccttcgccgtgttctattttctttacggggtggtgtatatgggcctcatggcctcccagatgcccgatttcgcctggagccagctcttcacccggtactacgagatctacggcatcctggccgcgcccctcatgctgtgctataatgggcagcggggcggaggccacaagcggctgttctacgccttctatcccgcccatatttacatcctctacgccctgtcgtgggggctctatcttctgctgaactgaggtggtatccatggcccatattctggtggtggacgacgacggggatctccgcgccctgctgaaaaccgccctggagcgggacggacaccaggtctccctcctcgaccgcggtggggcggtgagcgaggcccactgccgctgggcagactgcattctcctggacgtgatgatgccgggggaggacggctttgccacctgccgccgcatccgcgccctggccgcctgccccattctttttctcaccgccaagaccgaggaggccgacgtgctcaccggcctggggctgggcggggacgactacctgtccaagcccttccgcatcgcggagctgcgggcccgggtggccgctcacctgcggcgggagtcccgggcgccccgcagccgcatccgccgcggcgggctggactttgatctggaggagcgggccgtctactgcggggaggaaccgctgcacctgacccgaagcgagtatgccatctgcgcccatctcgccgcccaccccgcccagaccttcaccaaggagcagatctacgaggcggtattcggctttgacggcacggcggactcctccgccatcacggagcacatcaagaacatccgcgccaagctgcgggccgtggggctctcccccatccagaccgtgtggggggtgggctacaaatgggaaagcgcatgaggcggcggacggggctcaccgccctgttctggcgctacctgctcgtcaccggcggagcggtggtgctgctggccgtcctctggtggggcggcctgtccgccctgctccgcagcggctttgtcctcccggcgggcaccgccgccgggcaggcggacgggctggtccgcgccctggaggccggggagctgaccccggcggagctgccccactactaccgctgggccaccttcgacggctccgcccaggtggtggggcagcgcggcatgaacgagcggcgcctgggctatgcccaggccgcgctggagggcaaccgcaccctccacggcttcccctaccagcagtaccaccgctctgcccagctccccgacggcacggtgtgcctgctccagttcgactactccatgccctacggctcccccgcgctccaggggaggcttccggagttccagacctgcgccacggcggtactgctggcggcctggctggccgccggggccctctccacccggcacttcgccggcctgctccggcgggacgccgccctcctcaccgccgccaccggggccatcgccgcccggcggctggacgtccccctggacgggggcgcccgggtgcgggagctgggggagagcctggccgccatggagcagctacggcaggccctggcccggtctctgtccgagcagtgggccatggagcaggagcgcacccaggcgctggccgccctggcccacgacctcaagacccccctgtccatcgtcagcggcagcgcggagctgctggaggaggacgccctctcccccgcccagcgggagcgcgtggacgccattctccgcagcgccggacgcatccgggactatatggagcagctccgcgccctcaccgccgccgggggcccggcggaggtgggcggccgggcgacggcggaactgtccgcgctggcggagggctgggcggccgctgggcgcggcctgtgcgcccccagggggctgcgcttttctctggactgccccgcctcccgcccctgtaccctgttccggtcagagttggaccgggcggtgctcaacctgctggacaacgccgcccgcttcaccccggcggggggcgcggtgcgcctgtcggcgtatgtggaggaggccgtactcaccgtggccgtggaggactccggccccggcttctcccccgaggccctggcccgggcggggcggggcttttacaccggcgacgccagccgcccccaggacggtcacatgggcatgggtctcaccttcgcccgccagaccgcccgccgccacggcgggacgctggagctgtccaacaccggccggggggcccgggcggccctcaccctgcccctctgaagaaggcggcgcggttttccgcgccgccttcttgtatttttgccggttgcgcgctatcatagagggagaacccatcccaacactgtgaggtctgccctatgatttttgacacccacgcccactactacgacgaggccttcgacgccgaccgggacgcgctgctcgcctccctccccggccggggggtggccctggtggtctgccccggctgcgatctggagtcctcccgccagtccatcgccctggcggagcggtacggctttctctacgctgccgccggataccacccggaaaatctggagggggcggccctctccgatctggacgccgtcaaggccctgtgcgcccacccgaaggtggtggcggtgggggagatcggcctggactactactggctcaagacgccggaggagcgggccaactcccgggacttcttcgacgcccagctctccctggcggaggagctcaacctccccgccatcgtccacgaccgggatgcccaccgggactgcctggacatcgtccgcgcccaccccggcgtccgtggggtgttccactgctattccggcagcctggaggacgccaaggtgctggtggacaagggctggatgctctccttcaccggcaacatcaccttcaagaacgcccgccgggcccccgacatcctccgctggctgcccctggaccggctgatgctggagaccgacgccccctatatggcccccgagccgtaccggggccagcggtgcgactccaccatgatcgcccgctccgccgagacggtggcccagctccggggcctcacccgggacgaggtggaggccgtcaccctggagaacggcaagaagttctttggcatcgcctgaggggcggacggcctccggccgcccgtccatcctggctctgaattgataagggaggtaatccactatgatgaccatttcctatgagtatgagggcgcgctctacgtgaacctcaccaacaggtgcgactgcgcctgcgtattctgcctgcgccacaacggccacaagggctccatctacgccgacgacctgtggctggagcacgagcccacccggcaggaggccctggacaacctgctggcccgggacttctcccagtaccgggagctggtgttctgcggcttcggagagcccatgtaccgcaccgacgacatcgtgtggctggtggacgagctgaaaaagcgggtgcccaacctgccaccggtgcgcatcaacaccaacggccacgccaacctgttcctgggccgggacgtggcccccctgctccaggggcgcgtcgacaccatctccatctccctcaacggctccacgccggaggagtactgcgccgttaccaagccccgccagggcgtgcaggcgtgggacgccatgctggactttgcccgggagtgccgggagtacgtgccccacgtggtcatgaccatcgtggacaaggacaagacgccggaggagatcgcccgctgccgcaggctgaccgaggacttgggcgttacccttcgtatccgggcctatatcccggactgaaacagctctctcatatgggcaggcgcgcccggcatagccgggcgcgcctgttgttttgtctctatgcggcggagtcctgctccagctcctccagcgcctcccactcggagtcggcggagaaccggaagcggcccatctggtcgtaaacctccacatgcccacgtacatagcgaatctcgtaattcattggtcagcgctcctttctgtctcgttgtgagtacagtataggaaatgcgctgtccaataaacaggactatttcttcaagtccgcctgaaactgctcccacgcctcggggcgctccacaaaggccttggggcagagcttccccgtcacatcatagtggcggatcacctggctggtgtcgaggccgtactcctccatgagccagcgggtgagacgcaccagggactcataggtggcagaggtgaattccccgctgtcgtccgggtggcagcactcgatggagatcgtgtcgtcgttgcgctggttggaacagtaggccacctcgttgagcgggacgttctggagcacctctccgtccagccccaccaggaagtggctggaggcgtaggtctcccccgtctgggccaggttggtgaaaaagctgtggttctgcgccgccgtggtgcccgggttgcccacgtagtggatgacgatgccgttgacctcctccagaggcgtgccgggccgggagaactcgttgagggggagcagctccaccgtgatccagtccggcgtctccggcagggggcgctccccgggggcgaaggggtcgatccacttgatgaccagcagcaccgccaccagggccagcagacacggaatcagccggggccggtgcctcacccgccaccggcggcgtaccggagtctctacgggcatgcttccccctcctttccacaaatttatctctattatagcagggttttgccccgccgtcttttacggttttcttacgttttgcctccgcccccgcgggatctgcccggtcggccggacaaaaagccccccggccggcgccggggggctggtttatggttcgcggagggcctggtcgaaggccgccttgacctcgggcagaaagcagacaaaggtgacggtctccaatgtgttatcctgcgccgcaaaatcacgcactgtattcaccgcgatggcggccgcctccgccagcgggtagccgtacaccccggcggagatggcgggaaaggccaccgtccggcagccgtgctccacggccagggtcaggctgctccggtagcaggaggccaggagctccgcctctccgtggccgccccccttccagatggggccgggggtgtgaatcacgtattttgcgggcaatttataaccctttgtaatcttagcctgcccggtctcacagccgtggagggtacggcactcggccaacagctccgggccggccgcccggtggatggctccgtccacaccgccgccccccagcagggtacggttggcggcgttgacaatggcatcgacctcaatccgggtgatgtcgcccagcacgcactcaatctgcgccatgctcctcctcctcgcgggcgtcctgctccgcctcggcctccacagcctgataggccgccgggggctggagcgccgccgggtcggtaaagacctgctcgaaggtcttggcgtccatgttctcgtactggagcagatactccgccacgatgtccagctccctccggcgatgggtgaggatctccccgcagcgggcgtaggccccgtccaccagggccttcacctcctcatcgatgagggcagccacctcctcggagtagttcttggtctgggccatggagcggccgatgaatacctcgtcgtggccggagtcgaagaccacattgcccaccttcccgctcatgccgtagcgggtgaccatgttgcgggcgatggcgctggccttttgcaggtcgttgcccgcgccggtggagatgtcccccaaagccaactgctcggcggcccggccgcccaggcagacggcgatgcgctcggtgagctgctgcctggtctggaaggtcacgtcctcctggggcagggagatggtcatgccgccggccatgccccgggggatgatggtgatctcatgcaccgggtcctgggtgggcaggtcgtggatgacaatggcgtggcccgcctcgtggtaggcggtgagcttccgctcccgctcgatgaccacccggctcttcttctccggcccggcgatcaccttgatcaccgcctcgttgagctcggccatgctgatgaagcggtggtgtctgcgggcggccaggagggcggcctcgttcatcaggttctccagatcggcgccggtgaaaccgccggtgcccttggccagctccgccagggacacgtcgtcccccaggggcttgttgcgggcatggaccttcaggatggcctcccggcccttgatgtcggggtgtcccacgtatacctgccggtcgaagcggccggggcgcaggagggcggggtccaggatgtcctgccggttggtggccgccatgaccaccacgccctcattgttgccgaagccgtccatctccaccaggagctggttgagggtctgctcccgctcgtcgtggccgccgcccaggccggcgccgcgctggcggcccacggcgtcgatctcgtcgataaagacgatggcgggggcgttcttcttggcctggtcaaacaggtcgcggacgcgggaggcgcccacgcccacgtagagctccacaaagtcggagccggagatggagaggaagtgaacccccgcctcgccggccacggccttggccagcagggtcttgccggtgcccggcgggcctaccagcagcacgcccttggggatgcgggcccccagctccagaaaccgcttggggtcccggaggaactccacaatctcctggagctcccccttctcctcctcggcgccggccacgtcctcaaaggtgaccttcttctgctcgtcggcgccggtgcgggtgcgggcgcggccgaagcgggcggtgcgatccacaccgccgccgcctcctccgcccccgccggccccggcctggcgcaggaacatgaagtaccacagcaggccgaacaccaccaggatgacgatccacgggataaagctcatccagtagggaggcacccaaccctggggatagtcgtagtcggtgatgatcccctgccgcttctgttccacaatgaggtcgttaaagtcctggtagaaccagtccgggttgccgatctgataggtgagcacactctggccgccctggggctccttcaggtacagggtcacggtattgtcctccagggagacccggctcaccatctgctgctccagcagctggcgcacctgggcataggtgaccttctcctgattccccatcccgccccggagggcgaagatggtcatcagcagaaccacggcgatgagcaggtaaaagcccacatcgcgcaggcttccgtttcgtttcaaactgcggacacgtcctttccgggcagattgggcgcctcaggcgcccgttattcctctcctccgtacacacagggcttaagaatgcctatgtagggcaggttgcggtatttttccgcatagtccagcccgtagcccaccacaaagtagtcggggatggtaaagccggagtagtgcagctccacctccttggtgcggcgggagggcttatccagcagggtgcacagccgcacggaggcggggctgcgggcctggaggagctggagcagatagctcagggtgttgccgctgtccagaatgtcctccaccacgatcacgtcgcggccctcgatgtgctcgctgagatccttgatgatcctgacctgcccggagctggccgtgcccgccccataggaggacaccgccatgaagtccacggtgcagggcaggtggatctggcgcaccaggtccgccataaacacgaaggagccccgcaatacgctgaccagcaggggctccctccctgcgtagtcccggtcgatctcggcggcgatctccgccacccgccggtgcagctcctcctcggaaaagagcacccgctccacgtccttgtccagcatgtgttccatacctctccctcactctttcttccagaataacagctcataggccgcctgtccagggacggccgtccggctctgctcaggcccgaagcccgccaccgcggccacgccccgaccgtcggccagaaccggaatccgctcccgctcccggcggggcaccttttcgtcaataaacagctttttcagcgtcttggttccaccccgcccgggcagtgtaaccgcgtctcccgtctgccgggggcggagcaccaggggaccctccagcgccccctgggccagatacagggccccgggcttccgctcgctctcgtccgggcagcgtaccgggcggcagcgcacccgccagggcgtgccctccacctcggtctcaccgtccagggccagaggcgtgggcagaaaggggggcagggggtcggactgggtggtgagcagcaactccctgtatacccgctgagccagccgtccgccgggcaggaacaccacggcggaggggtcgtctccccgggccagctccaccaccgccttgaggtgggcggcggagcagttggtgctgccgtcccccatcatctccagcaggcggcgcaccgcacggggggcgatagccgccgggagctgggcgatgtacctggcctcgatcaccaggtcgtcctccgcccaccgggcgttctgacaggccgcagcggcctgggcgttcagatagtcgttgtcggtgcgcaggtagcccatggtctccgcggcgctctcagtgaggcggggattgagctgacgcagcaccggcaccacctggcggcggatgcggttgcgggcgtagccctcgtcggtgttgctgctgtcctccacgtgggccacgccgttggcctccaggtaggccacaatctccgcccgggaggtggtgagcagggggcgcaccaccactccccgccggggcgggatacccgccagtccgtggagccccgccccccgcaccaggtggagcagcagggtctccagattgtcgtcggcgctgtgggcggtggcgatgcgtccacagcccatggcgtccgccgccccccgcaggaattcatagcgcatctggcgggcggtctcctccacccccaggccccgggccctggcctcatgggccacgtcgcccgcgccaatgacgcaggggatgtcctgcccggcgcaccactccgccacaaaggcggcgtcccggtcggattcggccccgcgcaggttgtggttgtagtgggcggccgccacccggaagcccccctctccggcccaggtgtggagcaggtgaagcaggcacatggaatccgcaccgccggacacggcgcacagcaccgtgcccccccgggggagcatgtcgtattcggttgtcagggctttgatggtttccagcataaagtctcctttacggtgggcggatgtgggcattcgcccctacgtagggggcgatgcctacatcgccccattccgcgtcaatattcgctgtgcctccggtcgatggacgagaaggtggtgtactcgggcagccactggagctccacggtgcgggtctcgccgtggcggttcttggcgatgatgcactcggccaggttgtggttctcgtcgctgtcgttgtagtagtcgtcccggtagaggaacataacgatgtcggcgtcctgctcgatggcgcccgactcacgcaggtcggagagcatgggccgcttgtcggagcggctctccgggccgcgggagagctgggacaggcacaccaccggcacgttcagctccttggccatgatcttcagggcgcgggagatgtcggagacgatctgctggcggttgtcgccgctgcgggtgggcccgccggcggaggtcataagctggaggtagtctatgaccaccagccccagattatccacccggcggcacttggcgttcatatcggccacggagagggaggggttgtcgtcgattaaaatctgcgtctggttgagggccgccgaggcggcggcgatcttggtccagtcctcctcccccagcttgccggtgaccagctttttgttgtccacaaagctctcgccggagatgaggcgcatggccagctgctcccggctcatctccagggagaagaagaccaccgtcttgccggagaacttgcccgcgtggaggagcatattcagggcgaaggaggtcttgcccatgccggggcgggcggccaggaggatcagatcggacttgttcaggcccgagatggccatatccacgtcgggcaggccggtggacaggccgggtaccgccgagtcgctggcggccagctcgttgagccgctcgtacacattgaggatgacgctggagatgtgggccagaccctgggcggaccggccctggcggatggcgtagatgcgctgctccgccgcctccagcacctcctgggcggtgccggtgccctcttgcaccatggcagtcagctctcccgccgtctcggcgatgcgccgcagcagggccttgtccttgacgatggccacgtactccttcacgttggccgccgtgggggtgatctccatgagctggaggacgtaattgcgggaggtgttctcgtcgtacaccccgttctgcttcatgtgctccagcaccgtcaccgggtcgatggtgagggagaagttgaacatggagtagatggtctcatagatctcccggttggtgcgcagatagaagtcctccggccggagggcctcgatcacctcgggcacgcagcgggcgtcaatgagcatggagccgagcacggactgttcggcctcggtgctgtggggcatctgccgggtcaaaagctcctcttcacttggcatgttcctcacctccgggagcgtaaaatgcgggcgggataaaacacaaacgccgcaggggcgacccctgtgagcgcccgcgggcggccataaaggccgcccctacccagggcagaccggctgagcgtatacagggacggcctctttgccctcccgttcccggttcaggcctcggccacgaccaccttgagggtgccggtgacctcgtaccccagcttgaccttcagctcatagccgccgaaggccttgatgggctcgtcctggacgatcttggtcttagggatggcgatgccgtgctgggcctggagggcgtcggcgatctccttgctggtcactgcgccgaacagccgcccgccgttgccgcccttggccactaccttcacggtcagctccttgagcttggcggcggtggcctctgcctccgccttctcggcggcctcctgggcctttttggccttctcctgcatcttcatggtattgacgttctccgccgtggcgggcaccgccagcttccggggcaggagaaaattgcgggcgtagccgtcgcttgcctcgatcatctggcccttcttgccctggcccttcacgtcctgctgcaaaatcactttcatcgggataacttcctttccaaatctcaaaacttattcaatagggcacgtgaaattccgacacccgccagccgccagcggtgcgctccatacgaatgggccagcgctctgtgctgagcgggcgggcgcccgtctcatccggctgcacggtcagatcggcgtaatgccccaccaggtaaaactccacggcgtccccgctctggctcaccagctcataggtgtccggcacatcggcccagccatactccaggctgctgccccgctccagctccaggaagcatgtccggccctccccatcggcggtgaagatggggaatcgctccccatccatattctccgtccacagcagctcctcctggtacgccggggtgaagatgccgtccagcatggcctggaagtcctcccaccgggcgtaccgcccctgggccaccagataggtccagccgctgtccagggtgaccgtctcatagtcccccagctccggcggatcgccgccgtccaggggatagctgtccacgccgctggtggagcagcccatgaggaagctggcggcgctatacgcccgcaggaagagcgcctgctgctccgcgtccaggaaagcgggcgccggctggtccgccatccagtccgggatggggggctccgccggagctggggcctccgtcgaggccggagtgacctccgccgggggcgtgggggcctctgccgccggggcggcgcaggcgcccagaaccagcgccaggccggccgccaacagcaccagcggtcgtttcacagttctcactcctcctccagatatgcgtcaatggcctggaggagcatatcgttgacctcgtccacgcctttgcccggcacctgggcgccggcggtggcggcgttgccgccgccgcccagcttctccagcaccacctgtacgttcacgtcccccatgctgcgggcggagaggatcacccgcccctcctggtcggggaagaggacgaaggaggtgtcgatgcccgagatgttgagcagctcgtcggcggcctgggcggcggtaatgcggcccacggtgtggtccaccttggctacggcaatgccctcatggtacattttggcgttctgaataatgtcgtacttggcgatggtgccctccaggtcgttctggaacagcttcttgacgtcgccggtgtccgcacccgagcggcggagaaaggcggcggcctcaaaggtgcggctgccggtacgcatggtaaactgcttggtgtccagtaccatcccggccagcagggcctccgcctcggtcttgagcaggtcggcgggctccagcaggtactggagcagctcggtgaccagctcgctggcggaggaggcatagggctcgtggaaattgagggccgcgtcagcgatataggaggaggcccggcggtggtggtcgatcaccgccaccttgtgcactgcctccagcagatcctggctcaccacctgctcgggccggttggtgtccaccaccaccagcaggcagttggcgtcggccagcaggatggcatcctgctgggagaggaacacgtccttgtactcgcccagcccacccagccgctcggacatctcgctggccgggttctgcccggcctccttgatgatgtgcaccggcgcgcccttcttccgggccatggcgcacacaccggcggcggcgccgatgcagtccatgtcggggtacttgtggcccatgacaaacacccgggaggcgtcggccatcagctcgcccagggcattggccatgacccggctcttaaccttggtgcgcttctccagctccttggtgcggccgccgtagaactcgaagttgaacttgttcttgaccaccacctggtcgccgccccggctcagggccatctccaccgacagggccgcgtactggaacagctcggccagggtgtcggcgtccttgccgacgccgatggacagggtggcctggatgcccgaggggctgaccacctcccgcaccgtctccaggatggagaacttgccctcctgaaactgggccagaaaccgctcctcaaagacaaagaggtagcggtcccgctcgtaccggcagaacagcccctgagccggggccacccactgggccagccgttcgtcgatgccgctgcgcatggcggagcgggcggaatcggtggcccccttcatcagctcctcatagttgtccacggtgagaatccccaccaccggccgggtggaatagtagatgtcccgcacctgggcgaagtcggtgacgtccacccagtaggtggtggccaggtagccccgcccgccctgatcctcggtgcggaccaggtggccgaagaccaggaagcgccgctccccgaggcgcacctcggtggggcactcggttttcccctccatgagccagcgggaggagaagtcaggcaccgccgcggtgattttggtgtcgaacaggtgctcccgctcgccggtgagctggagaaagcggtcgttggaccagatgacctcgtcgttctccggccggaagatcaccatgggcagcggggcgttgaccatggtatccttggtagccgtatccatgttgcaggtgacgctctcgatgtatttgatgatctccttctgcctctgggcgttgctgcgccggaagtagaggtagagcaccgccaccaccgccgcctcgatcaccgccaccgccacgctgaacagggccgacaccgcggcgaagaggagcaggaacacaaagtagagccgcaggctgggctccagcagatgggtcagcttgtttttccgcattgagacacctcccaagcaggtcgtacggtgcagaacacacataataagagatattattatatcaaagggccgccccaaaaacaagcccgcttgccctggttcttgccttgtgatagaatattccgggtattgtatcatgctttacattcttttttcccctgtactgccatacttttggaaaacaaatgaacgatcgaggaggcattcccatgaaggaatatcccgtgcagcgcgccgcggtgctcaagccgaagcccgatcccgacacgctggtcttcggcaagacctttaccgaccatatgtttatcatggactacaccgccggtcagggctggcacgacgggcgcatcgtgccctacggccccctcgccctggagccctccgccatggtgctccactatgcccaggaggtctttgagggcctgaaggcctaccgcggccccgacggcggggtgcagctcttccgccccatggagaacgtccggcgcatcaactcctcctgtgagcgcatgtgcatcccccccctgccggaggaggacgccctggccgccattgagcagctcgtgcgcctggagaccggctgggtgccctccaaaccgggcacctccctgtatatccgccccttcatcatcgccaccactccctccctgggcgtgcacgccgcccacgactacctgttctgcatcatcacctgcccggtgggcgcatactacgccgagggaatcaacccggtgaagatctatgtggagaacgaggacgtccgcgccgtcaagggcggcaccggctacaccaagtgcggcggcaactacgccgcctccatccgcgccggggagcgggcggagcagaacggctacgcccaggtgctctggctagacggcgttcaccggaagtatattgaggaagtgggctccatgaacgtcatgttccaggtgggcgataccgtgctcaccccggagctcaccggctcggttctgcccggcatcacccgcaagtcctgcctggagctgctgaagtcctgggggctgaaggtggaggagcggctgatcaccgcccaggagctctttgacgccggggccgacggcacgctgaaagaggcctggggcactggcaccgccgccgtcatctcccccatcggcgagatgggctgggaggaccagcacgtggtggtcaacggcggcaagatcggccccctggcccagcgcctgtatgacaccctcaccggcatccagtggggtacccggcccgatcccttcggctgggtggtcaagctctgattttgcgttttttccctttccatataatttccattctgaaacgccgtgcggggccgcctctcaatgcggcgccccccgcacggtttaacctccggttttcttttcccggccaaaacctgagcaccgagcccttgccctccgctccgccgtctgctaggatagaaccgcaggggcggcccgcccgctctcgcgcagcaaggaggcgtctgtatgaacttaaatggaacgatccgccgcctgcggcgggcaaaggggctgacccaggagcaggtggcccaggccctgggagtaagcggcccggcggtaaacaagtgggagcggggcgcatgctgccccgatctcgccctgctggccccgctggcccgcctgctggacaccgatctgaacactctgctctccttccgggaggagctgaccggtgcagagatcgccgcgtttacagaggagctttacaccctggcccagagcgggggcatcgatgcggcctttctgcgggcggaggagctgctccaccggtggcctgggtgcgaccgcctgaccatctctctggccatgacgctgaacggcctgttcttcaccctgggcgtggccgagccggagccctacgagcgccgtctggagcctctgtaccgcgctctggccgacagcgaggagccggatatccgggatcaggccctccacctgctcatcggcagacacatgaggcgggaggagtacgccgcggcggaggagctgctctccgccctgtccgaccgctggccccaccgggacgctttgcaggcggggctgctccgccggacaggccgtggggaggaggccgcggagctgtgggagcggcggctgctcaatgccgcgacggaggtctacgagtcattggtcagccttcaggagctggccctccaggcggagcggctggaggacggggcccggctggccgccctcattgaggagacggtggagcgttacgccctcattcccggcgtcgcctcctccggacggctccaacaggccgcggcagagggggacaagacggccgccctgtctgccctgcgggatatgctggaggcgctcaaccgctcctgggacggcggggggctatatccccaccttctacccggcacgcaggtggccgtcgggtccgttctgttgcccggcctgctgctggagctccagcgggagcccgaactggctttcctccaggacgagccggaatttcaggccctgctgaaacgctatggcggcgggacgcattaagcgtccccccgccccagcttgtcgaaaaagtcctttcgacaagctgctggacttttgaacacttcaaaaaagtgctcaaaagtcgtttgattggacgtgaacggcccaggccggtctctcttggcctgcggccaattcaccttcagacaacccttacggttttctttcacactatctttccctccgaatccttcagatagagggtttatcgacagtctgtggcggggggggggggacgcattaagcgtcccgccgcccttctctttttcaccgtcctgtggtacaatggcggaaataatccaacacggaggtgatcccatggtcaagcgccgcgccctcctggcgctgctccccctgcttctcctggctggctgcaaacaaccggagaagttttccacatcctctggtgtatctgtggaaaatcccgccgccgatgcgctggcctccgcccagcttggggagctggacggcctgctctccgaggcggagctggcccatgtacatacccttgtggaacagctcctccccctgcgccagacacgggaggcggaagcacggtggcagttgtccactgaggaggccaatctggtggaccgcctcaaccggctctatgagcggtacacgctcaaatacctggggggcggcgggtcctggggctatgcctctcccgccgagcgcccgctggccgactatgccgtggagccggacggcggcctccggctgacctctggggaggatgtctaccgtcccctgtgggcacaggtgaacgcccttctgcccgagggggccctggacggcttttcccgcttcactgtctttaccgacggtctggatgaaaccctggcctatgtttcccccctggatgacacagggacgcggtgggaactggcagtggacccggcggatgccggggagttggactggtttaccgaaaccgtcctccacgagtatacccactacctcaccctcaacgacacccaggcggactacggcgctccggagagcggcgcccggtactgcgaggagggcatggtcgcccggtccggctcctatctggatgacttctaccacaccttctggacggactacctgcatgaccgcctggccaatccggacagctatggcttttacctccggcaccaggcggatttcgtcaccgactacgcctccaccgacccgtcggaggacattgcggagagcttcacctactttgtcctgtgggacgccccggagggggatgccgtctgggaggagaagctgaactttttctaccgctatcccgagctggtggagttccgcacccaggcccgggcccggctgggtctctagcagaccagcgcgcggaagccccggggggccccggagcggaacgtccgctcctccccggtgaaggggtcggtcagggccagctcgtgggcgtggaggcacaggcggcccagcgggctggcggccgcgccgtagtcccggtctcccgccacggggcagcccagctcgctcaggtgggcgcggatctggttcttgcgcccggtgtcgatgtccacctccagcagggtgtactcccgccccgcctggatggtgcggtagtgggtcaccgcctccttgccgccagagcggacggagtagaccttgtgggcggcgttctcccgcagaagggtgcggatggtgtcctcctccctggggggccggccctccaccaccgccagatagccccggcggcgcaccagcgcatcccagtgctcctggtaggcccgcttggcctcctcgtctttggcgaacaggagcacgccggaggtgtcgcggtccagccggtggacgatgaacacccgccctccgggcctggtgcggcgcacgtactcccccgccatgcggtaggcggtgcgcaccttctcccggtcgctggccatgctcagcaggccggagggcttgtcaatgaccaggatgcgcccgtcctcatagagcaccgggaagggggcccgccgcgcctccgccccctgggcgagcacgctcacccgctggccgggggcgagggggtggtcgtggcggcggacggccgtcccgtccacctgcacctgtccccgggcgagcagcgacttgatatggttgcggctccccttcgcgtgctccagcaggaagggcagcagcgggccgccccgctccacggtaaactgcatctctttcacaccatcacatcctaggagggatttttatgaacgaagttctgtcccagctccacgcccgcaagtcggtgcgggcctttctggaccggcccattcccccggaggcccggcgggccatcctggaggcggcctgcgccgcccccacggcggggaaccagcagctctataccattttagacattaccgaccaggccgtcaaggacacgttggccgacacctgcgaccaccagcccttcatcgcccgggccccgctggtgctccttttctgtgccgactgccagaagtggtacgacgcctttgccgccgggggctgctccccccgccgccccgggccgggcgacctgtggctggccctgtccgacgccaacatcgccgcccagaacgccgtcaccgccgcctggagcctgggcatcggctcctgctacatcggcgacattctggagcaggtggaggctcaccgggccctgctccgcctgccggagtacgtggtgcccgccgccctgctggtgttcggctaccccacgcagcagcagcaggagcgggaaaagccccgccgccgcgccttggagcacatcgtccacgagaacgcctaccgccgcatggagccggccgagctggaggctatgctggccgacaacgccggagcccggccctacggtgcgtggctggacgccttctgcaagcgcaagtacaactccgatttctcccgcgagatgtcccgctccatggccgagtacctcaagccctttctgccgtaaaaacgcccgctcccggttttggctggaaaccgggggcgggattgcattttccagcctgcttcggtaaaatggagccggtaccagccaaccgggaggagagatgcttatgagtccagcagatgaagcatgggtgaaggaactttatgaagccaatgccctcaaactgtataaggtcgctttccgccggctgggcgataaagacgaggctgagaatgtcgtacaggaggcattcttattgctcctggctcggtttgataccgtaagagttcatccaaacccctccgggtggctgatgaaagtcgttcaaaacctaatccgccattctatggacaggaaccagaagcaatctagccatgaaatttccatagaggaacaaatcactcaaatcagcgcccctccaaaacagtttttttctctgcgcgatatactgccgccgggcctcacccagcgggaacaggatctgttggtctggttctatgaggaagggctgtcctacgaggagatttctgcacggctgaagattccgatcctgacctgccggactcagatgttccgggcaaagcaacactataaaaagctggcggaaaaagaaacagatttttcagaattgatgtaatgtttctatcagtctttctgatattcctaagaaggaggtgtcatgatgcccgagaagaaacgagccccacaccagtcgggcagagggaagggcaacgtctctcaaatccaaggacatctgtgcgacaaaacagcggacgagctgttgacagagctggaagccaggatggatgaaatgacagaccttacctatgatgaggatgtgattgactcctatctggccgccctggacaaaaaagctcctctcgaaaaagattttgatgtggaacggtcatgggaaaagttccgttcacagcatgcgattttattcgacgaggacattttgcccaaaccggaggttccccaaagaggatctcatggattccgtttccgcagagccttcgcaagagttgtcgttgttgcggccatcgtcgccgtattcactatgttttgtgcacaggccgctggcatcgacgtgttcggtgcaatcgggcgatggacggaggagacattccgctttgctgccccggcaggccctgcaacttccgcggtttccgcagttcctgttgacattgatggggttctgatctacgaagtggagcaataccccacgcttcaggatgcttttgacgcccactccatttctgaaccgctggccccgtcctggattccggaggggtatgtgctggactatgtggaggccagcccttcaaccggacaggtcgtattcactgcctcctacagcagcggtcagagcatcctgaaccttatgtattcctatcgaatggacggcaccttttcctcatccatctttgaaaaagatggttcctctgtgatcgagtacaccaaaaacggcattgtccactacatcatgtcgaatgtgaatgtacgggtggctgcctgggtgaacggtacctgtgagtgctctattacgggaccgttgaccgaacaggaaatgatcacaatcattgattctatttatacataagagaggagcagtcaactatgaaaaaatctctgcgctgcatctgtgcagcaatttttgcgctggccttctgcacaggcttcgtcatccatgcttcggcggttgagcgggcaagttcctatcttacgagatattctgccacgcttttcgcgggtgaccgcggcgccgttgaaataacgatttccgtcgtcgcaaatcaacgtgtttcagaactgggcgccagctacattttgttggaggagtccgacgatggcggaaggacctggagcaccgccaaagagtacgagggcgaaagctggatgaccgccgaaaaccgctccagctacagcaggaccctttcgtatcagggaaccatcggacatcaataccgggtaacggcggatgtctttgccagagacgccaacggcatcgacagccgtaccactcccacctcctccgcggttacggcaaaaagataaatagctctattaccaactatattttttctattttgtaatgatcgtttatttgtattataaccggctgatggaatgacttcgcattccatcagccggtttattagaactcgtctgtttcctcttccttaaaatgtttgccgcaatgagggcacactgtgatatttcgcccccacattggaaatcgcttttcacagtaaggacatttaggacgagcatatcgtcccagccatacacaattcactgtgactatggccgatccaaagaacacctcgcctgatatcagagatgcaatcaagagaaatatcaaacaacctaatgaagtaaaaaaacctactcgtgtgctatgcacgctctttaatttcatatttaccttggtgttaacagtcaagctctaatgtagttactgtatttacgtcaaaatagtatagcgtttcataggatcgatatatatattccaccgtaggttcgatctctacttcgtaagtcttgtgctctccaggatccattcggaagcatactgctgccggaactacatcaaaatttatgccctggtctgcgacactaagtcccattttaaaaatagcctctgttccaaatgggtcgatttccattttacttgcttgtggcagtatcgtatttaaggtttctagtactacaccaacataccctgcggcatctttaaaaatgcccaaaatggataaagcagctgataagagagaaaatactgtatccgattcaccagtatccacccccggcggggcttcataaaatctgagaaaagcacaatcctttgtggtagtaccgataattttaacctgactcaaataaacatttgctaaatctacttgatccgataattcttcacagtaagtatatggcgcaagtagcaaaagactatatctagtgtcattccctgcctcagaaatagccccttccggtttaaagtatgcgtaaaaatccattcccggcccactgagtccgtagttattttttggcaccggcagggtaaacacttccacttttttatatccttttggcgtcgtaggggtacttgccagcgctaactgaccatctaaatcattcgtatcttcggaatatagaggatgcagtgcttttatctcgtctgtataaacggattcaccgactctaagaaatacagggaactcctcactatcttgttttttcattgaaatacctaaacaggccccttccgtacctatccgtttctggaacgaagacataatatggtaggtttctgtgcctatggagatctcgccctccagcggcccccccttcaattagagtaatgtcatcagaaagttctacttgctccagttggccctccagatgagtctcatacgtcgtgtctccactgtagaattggagttccacggacgccttaatgttttccgcagtttcattcaaaactaaattatagctaaattctgcggtcacatttggcgcgtcttctcctcttgtagccagcccattaaaaaacggcatctgcgagacttccgtgccgggttcatattccactacagcggtaatgcccgtttcagaaatggtatctgtcagactggttgccagtgccattggcgacagaagcgacaggagcactgcaagcaccaaaaccgttggtattccaatataacccctttttttcttcagcatcattttgaatcctcccattttcatttccctatcggggactggatgatgggttctttgccgctggtcgtgtactttgctcatagcaggcgcttaaatcattcccattgggctcaccccttctatgtgttttatgcacgcacatttcaagaatagcttcctgttggatctctttgtctctatatcagtctggaggatcaaaatattacacttcatctataattttttacgtaggccaggtctgttattgaaatttaaggagggcagcaagcctggattgcccctcttcctttattatagattgtaaactgcgtctctttggggcctaaccgccttccgacgcaaaaactttcctcctaacagcaggagcgccgcccaaatgggcggcgctcctgtttactttataaatgctcgcccttagcgggggttcttgatggcggcctgggcggcagccagacgggcgataggcacgcggtagggggagcaggacacgtagttcaggccaaccttgtggcagaactccacggaggtgggatcgccgccgtgctcgccgcagatacccaggtggatgtcggggcgggtctccttgcccagcttggcggccatggcgaccagcttgcccacgccgttctgatccaggtgggcgaagggatcggactcatagatcttcttgtcgtagtagtagctcaggaacttgccggcgtcgtcgcgggagaagccgaaggtcatctgggtcaggtcgttggtgccgaaggagaagaactcggcctccttggcgatctcgtcggcagtcagggcggcgcgggggatctcgatcatggtgccgacctcatacttcatgtcgataccggcgtccttgatgatcttgtcggcggtggcgaccaccacgtccttgacgtacttgagctccttgacctcgcccaccagggggatcatgatctcgggcaccatcttccagtcggggtgcttcttctggacgttgatggcggcgttgatgacggcggtggtctgcatctcggcgatctccgggtaggagacggccagacggcagccgcggtggcccatcatggggttaaactcgtgcagggaggcgataacctcgtgcaggcgctctacggtgacgccgatctcgccggcgatctccttgatgtcctcctccttggtgggcaggaactcgtgcagcgggggatccaggaagcgaatgacaaccgggcagccctccatggcctcgtacaggccctcgaagtcgccctgctggtagggcatgatcttggccagggccttcttgcggtcctcggtgttgtcggcgacgatcatctcgcgcatggccttgatgcgctcgccctcaaagaacatatgctcggtgcggcacaggccaatgccctgggcgccgaaagcgcggccctgggcggcgtcgcggggggtgtcggcgttggtgtagaccatgagctgacggtacttgtccgcccagcccatcaggcggccgaagtagccggagccggggtcggcgggcacggtggccacggcctcgccgtagatgttgccggtggagccgtccagggagatccagtcgccctcgtggtactccttgccggccagggtgaacttcttgttctcatagtccaccacgatgtcgccgcagccggacacgcagcaggtgcccatgccgcgggccaccacggcggcgtgagaggtcatgccgccgcggacggtcaggatgccctgggagacctgcatgccctcgatgtcctcgggagaggtctccaggcggaccaggatgaccttctcgccccgctcgtgccactccttggcctcctcggcggtgaacaccacgcggccgcaggcggcaccgggggaggcggccaggcccttgccaacgacctgggccttcttcagggcctcggcgtcaaaggtggggtgcagcagggcgtcgagctgcttgggatcgacgcggcacacagcctccttctcgtcgatcataccctcgtccaccagatccacggccaccttcagggcggcggcggcggtgcgcttgccgttgcgggtctgcagcatatagagcttgccattctcgatggtgaactccatgtcctgcatgtccttgtagtgcttctccaggcggtcggcgatggcggcgaactgctcgtacaccgcgggcatctcctcatgcagcttggagatgggggaaggggtgcgcacgccggccaccacgtcctcgccctgggcgttgatcaggtactcgccgaacagggccttctcgccggtggcggggttgcgggtgaaggccacgccggtgccggagttgtcgccggagttgccgaacaccatggactggacgttgacggcggtgccccagtcgtaggggatctcgttcatgcggcggtagacgttggcgcgggggttgtcccaggagcggaacacggccttgacggcctccatgagctggaccttgggatcctgggggaagtcctcgcccttctccttcttgtagaactccttgaacagaaccaccaggttcttcatgtcctcggtatccagctccacgtcctgcttgacgcccttcttggccttgacgtcgtcgataatctcctcaaagcgcttcttgctcagctccatcaccacgtcggagaacatctggatgaaccggcggtaggagtcgtaggcaaagcgggggttgttggtgaacttggccaggccctccaccacggtgtcgttcaggcccaggttgaggatggtgtccatcatgccgggcatggaggcgcgggcgccggagcgcacggaaaccagcagggggttctcgggatcggcgaacttcttgccacagatggcctccatcttgcccaggtactcgtagatctgggcctggatgtccgcgttgatctggcggccgtcgttataatactgggtgcaggcctcggtggtgacggtgaagccctggggcacgggcatacccagattggtcatctcagccaggttggcgcccttgccgcccagcagctcccgcatggagccgttgccctctgagaacaaatagacatacttatgcgtgttggccatttgtcattcctcctagatttacgttgcactactatactcaaatacagtaaccggagacattataccattttgccaaaagattgcaagagatacccgtcggttttctttctcttttgctcaattttcgccactttgggcgcacggaagtgccaactggcttcattttgctccagccgtccccaccccgaccggccgcgcataaaaaatgcccgcagaagcggacatcgtgtttttaaatgtctacattatcaaacatgtggatgtttagtaaatatatcatttttgcaggaaaattgcaacaggctattaatatattttacaaatttatttcctaaatcttcctatcgcaaaatgttgtatcctcgtttaaaaaggtagacatttacaaaaaggaggatacaccatgagacatcaaaaaaaacggtggtttgccgcattattagctttatgtatgttactatctattcttccttcaacttctctagcttttagtgaaagcgaagagacctggagtgggaacaggaggaatcagaccattgatggcggaacccatacaattacgcttagtaatcttactattgactcaccgggcgttgagaaatctgctattgatataactggtaacgcagatgtcacctttatattggagggcaacaacactctcagcggttaccggaatcatcctgccatctgggtggagtccggttcctccgttacctttgaaggaaacggattactcgaggcctccgccggcggggcatccatcggtttgggggcggccggaatcggcggtggatatggcgccagcagtaattttggcaatatcaccatcaacggtggtaccatcattgcccgaggctccggaggcggcgcgggcatcggcggcggctacgaggtcggcagcgggactgtaaccggcaatattaccatcaacggcggatacgtcacggccatcggtgggtcaagcggcagtaccggcggcgcgggcatcggctccggtgagaatgcaaactatggcggaaccgtcaccatcaacggcggtgtggtatacgccgagggcggtgcggactccaccagcatcggcagcggcaaccgtgctatcggtacaagcgacaacggagccttcaccaccggcacgggcggaaacgccgtcatcgtggccccggacggcattggggacccctccggcttcgctgactgggacggtatttttatcagctatgagggcagtaatacgagcgcgacggtgggtgaggacggtacggttcacctgaatgacacagaggccaatatccaggtctggggtgaaccggtgattgactatccgcttgtggtggaaagcggcaccgagctgcgggtcgtccagaatgaccgaaactacgcctacgccactctggaaatcggccaggacggcaaactgaccaataacggcaccgtcaccgtagacgagggaagcaccctgattctgctggaaggtcttgaccagacagatggcagcggtacactggaatgcaccggcaccgtcaaactgcccccggaggaaaagctgattgccctgtccggcgcggaggacctgacctacaacggcacggagcagagccccgaggtaagcgttacattaaatctgtggggctattcccatacctatgggaatccggcggactataccgtaacttacacagatgccacaaacgccggagagaccgccaaggccgttgttacctccactggtgccggcgacctgctggagggcagcgccttcaggacctttaccattcaacccgccgattataccattaacgtgtccgacgggaattggacagtggcgcatggtgaaacgcagctcctgtccaagctgccccctgccaccatttccattgacccgtcgattcaagatgacctgaccggcctgagggctgggaaactgacttggtatatggatgggcaacattcgcaagcggtgaccgatacctcccttcagaatacatccgccggcgaagaggtacccctctattgggttttcagccacagtgattccaattttgcgccagagtccaagtccgggacactgaccatcacgattaccaatctgcccatttatccggttgtgatccggcagggagatgaggttgttacaaatggtaccatcaacaagacctatggggatgaaaacttcactctaactgtcgaacttcaaaaggatgatagccctatttctcctgatagtctcgttacctttgctagcaataatgaagatgtggtaacagtagccccgagtggtgaggttaccatcaccggcagcggaaccgctgtcattaccgccagcgtggcggaaaaaggcggagacgatggctatgccgccgccagcggtaccgtcaccgtatctgtggctcaaaagccgatttccgtggatgacagcaccgtgaagctgaacggtcagactccgggcgataacggaatctatacgtgggcctacaatggcgaggaagatgttagcatatcggctgaattgacggctggctccctggtaagcggcgacgaggggcaggtcaccctgtctgccactggtatgctggacagcgcgaatgccagcagcacccgccttcggaccgcagacattacctataccttgtccggcgaccgggcggagcactacacgctttctccccgtacggcagaaaagcaggttgctatcacaaaagcagactccggaacctccggaatcttggccaaccccggcaccttgaccatcgccaaccgggccgccagaagttattcctttgatcttcgcactttgaatccggataatgccactctcggcattacctcgtatacgaagggcgacataaagttcgagtccggcaaggagtcctattttacctcaaacgatgtaacgatcacaggcaatcttctgaccttgaaagccaacgctgtggacacacaggataccggaaaggtggccgagatccccattgtgatccgcagccaaaactacaccgacttcaccggcaccatcacggtcagcagcaaaaatctccatatcctgacctatgatcccaacggcggcagcggcggccccggaacggagctgctggacacccagaccggctacaccttgaagcagtcccccgtccccactcacgaccagcaggacggcgtggatgtactgtttattgggtggacagcgaacaccactggagacaaaatctacaccgccagcgatacagcgcctgacattattaccaacgtaaatatcagcagcgacacgacggtttacgccgcctggggcgtggataccaatggcgacggcgagccggacgtgaacgagaccaaatacaccctgtcttataacgcaaacgaactggatggcggctccttgagcggcggcagcctgcccaccggcggcacttatgtcaagggcaatacggttgccctggccgatggaagcggcctcagcctcaccggaactaccaccagcgacaagggaaccgccctctttgtgggctggtccaagacaccgattaacagcattctctctcagaatgacaccatgcccgccggtgttgtggagcaggtaaccttcaccgactccaatatcaccgttcacgccgtctggggctgggacaccgacaacgatggcaagcccgacatcacccagaatccctccatcacctcctccgcgggtgagaacggctccatcgccccggagggcaaggtctatgtcccggccgggaacagccagaagtttgattttactccggacgccggctatgccgtggaccgggtcaccatcgacggcacggcctatgtcaacaacggggtcaacctgctgcccggcatggagacctggaaaaagtgggaatcctacaccttcgccgatgtccgggaagatcacaccatttccgtgaccttcggtgcggatgccgacagcgacaacgtccccgacgccaacgagggcaccgtcaccctgacctataacgccaacggcggcgagggctcggcccctgacgcccagagcgccaacaagtggaccgccgtcaccgtggcgaaaaacaccttcacccgctccggttacagctttgccgggtggaacacccaggcggacggcagcggtgaggattatgccgccggcgacgccttccagctcaccggacaggatgccgtcctctatgcgcagtggagctataacggcggcagctccggcggcgtcacccggtacaccatcaaggccagcgcgggggagggcggcgggatcagcccggacggcagggtgcgggtgagccgcggcagcgacaagaccttccgcatcacccccgatgccgggtatgagattgccgacgtgctggtggacggcgaaagtatcggcgcggtcagccgttacacctttgaaaccgtgcgtaagaaccacaccattgaggcggagttccgtgccgtggagaaggccacggatacgggcgtggaccgctggctcaacaccaccgaccatatggcctacctcaatggctacggaaccggcctcttcggccccgacgaccacatgacccgggcccaggcggcccagatgttctacaacctcctactggaccaggaggtgtccgccgcggtccgcttcaccgacgtgcccgccgacgcctggtacgcccgcgcggtggagacactggcctccctgggcatggtggaaggcgtaggcggcgggaaattcgccccggagcgcaccatcacccgggcggagttcacggtgatggccatgcgctttgcccgcctgcccgagggcggggagaatcccttctccgatgtgacctcctccgactggttctacgaccaggtggtgggggcggtgcagtacgggtggatcaccggctacaccgacggcaccttccggccggaggccaccatcacccgggcggaggtgacggccatcaccaaccgcctgctggaccgggcggcggacgaggactacgtggacgaccacgccggcgagctgcgccagttccccgatgtgagcgcctcctactgggcctaccacgacattgtggaggccaccaacgcccacagctaccgtgtctatgacggcgaggagcactggatgtaagtacctcctgatcttcctcttccatacaaaagcgtcccccggaaccgattggttccgggggacatcttttattcccgcttgtccaggggaaacaggattttcagaaacagcttttcggccgggccgccgcggatcagatcaaagctgcgcgccgaaccgtccggcccggtgacggtaaaccggcccgccccgttgaccaccgcgaagcccagggcctccagggtgagctggagggtgagctcccactccagcagggagtccaccgccccctcccggtaggcatcccacagccactggaattccatgggctgggtcccgtcctggaggaagccgcgccacagcgcctccttctgccgggccgtgagggcctccagcgcgtccagcacaccggcgtcctcctcccaggccagatatgcgtagcggctccccgtggggcggcggaccggaaggccatcccccagggcggcggcctgggcgggctccagggcggcgctggaccgggtgcgggcgctcccggcgcacagggcggcccaggcggcggcccgggccggagtgtccatctccacccgcaggcacaggccggtaagctggtcaaagggccggccggacaccgagcgcaggcggatgactgcggcgccgtccgcacgcacggcggcccgcagctcgccggtctcccgccgggcggtggtgccgtacaccgtcacgggccagagcccctccagccccgccagcgccccgccgcacacctccgccagatcccgccacgggaacactgtgtccgggtagaacagcagcagcgccgggctgtccggccgctggagcaccacaggctcacagtcaaagagctgtcccacatcccgcatcaggcccagcagcgccccagggcctgccgcgcacccaggccgcagtccagggagccggtgctccccggcggggcggtagggatacagcatggcctctcctcccccgctcatgcttcgctctccgccccggcctcctcgtcgggctggcggatcatccggtagcccacgccgatgtgggtctggatgtaccgggggtggctgggatcgggctcgatcttcttgcgcagcgtggccataaacacccgcagggagggggtgtcggagggcagggcgctgctccagatcttgttgagaatgtagttgtgggtgagcaccttgccggtgttctgggccagcaggcacagcagcttgtactcgatgggggtcaggtggatctccttcccgttctggtaggtgcagccggcggcgtagtcgattttcagcccgccgttctggtagatgctggccgcctcgtccaccttctcgctgtcgtagcgcacccggcgcagggacacccgcagccgggccagcagctcctccaccgagaagggcttggtcagatagtcgtccgccccggcgtccagggcctccaccttgtcatgatcctcgctgcgggcggagatgacaatgatgggggtgttgctccaggtgcgcaccttcttgatgatgtccacgccgtccatgtcgggcaggcccagatccagcaggatcacgtcgggccggcaggaggccgcctccagcacgccggaggcgccgttcttggcccgccggtactggtagtgctgagtctccagggtggtggaaatcaggttgccgatggcgttgtcgtcttcaatgatcaagatttgaggtttgttcatcggtgttcacctccgcaagtggtagtgtaaagctgaagatagcgcccttgggatagttgtcctccacggtgatggagccgccgtgggcctgcacaatggagcggcacagggacaggcccagccccaggccccgccgcccgtcgccccgggcgttgttggctgtgtaaaacatgtcgaacagcttggccttggcctcgtccgagatgccggggccgtcgtcggcgatgcgcacctccacgctctcaccccgcttccgggcggacacctggacatgggagccggggggcgtgtatttgatggcgttgttgacgatgttgatgaccacctgcacgatcaggcgggcgtccattttggccatgagcatgtcgtcaggcagctccacggtaatggtgtgctccttggccttccggtccaggtgggtcagggcctcctggaacacctcctccagcagctccggctccatcttcagacggatggtgccgttctcaatgcgggagacggagagcaggttctccaccaggttggccagccacatggagtcgtcgtagatagaggtgtagagctgccgccgcttggccgcgtccagcacggaggcgttctccatgaggatgcccgcgttgcccgaaatggcggtcagcggggtgcgcagatcgtgggagatggcccgcagcagattggcccgcagggcctcctgctgggcctgctcctccacccggtgcttctcctggcccagcagctccttctccagcaccaggccgcactcgtccacgatggccagcatcaggtttttctcaaaggcgtcgggctcccggccctcctcgatggcaatacccgccaccgccagggcgctgccctccccccgcaccgccagatagaggcacttggcgttgggcagggtgttggtggtggcgccggcgtgcttgttgttcttctgcacccaggaggccaccgccgtctcgtcagggcccaggtatgcccctgtgtccacggtgggctccacggggaagaactggggctggcccagggtgccgttgggcagcaccgggtagtacagggccgtccgctccagcagcttgcgcagttgtaccgccatggcctccagaatggcctcctggccctccgccttctggagggtctggctggcctccagaagcacctgggtgcggtaggcctgccgggaggccagccgcgcctgccgcttgatgcgggtggtcagcgagctgctcaggaaggccaccaggaacatcaccaggaaggtggccagatagctcttgtcgttgaagtggagcgtgaacagcgggacggtaaagaagaaattgaagataagaatggacaggatggaggccgccaggctatagagccgcccgctggtgaccatggccaccaccagcacgcccaactggtagatcatgatgatgttggcctcgctgaagtccagataggcgaaggccaggcccaccatcgtgcacaccgccaggatcaccagggtgcgcagcgcgtccttgacggtgaaccgctcgctgaggttccagctcttccgcggcgcccggtaggcggggtaggtgtccgggatgatgtggatgtccagatcgggggccagggcgttgagccggtccaccaggtttttgctccgctcccaaaagaagcgcttgttattgctccggcccaggacgattttagtcacgccgctggcccgggcgtactcggcgatctggaggggggtgtcgtcgccgtacaccgtggcgatgcgggcccccagctcctccgccaggcgcaggttggcccgcaggcggctgcggttgtcgtcgctcatgtccttgaagtcggaggtctccacgaatagggcggtgaagctgctgcggaaggcctccgccatgcgggccgccgtgcggatgacattggcgttggacggcgcgccggacaggcagaccaggatgtgctcgctactcttggccttggtgcccaccccggtgtccgccgcccggttgagccggtctgcggtgcgccgcagggcgatctcgcgcagggcggccagattcttcagggtgaagaagtggtccatggcccgggccgcctggttgggccggtagatcttgccctccttgagccgctccagcagatccgccggctcgatgtccactacctcaacctggtcggcgcggtcaaagatccggtcgggcagccgctccgccaccgcaatgccggtgatggaggccaccacgtcattgaggctctccaggtgctgcacgttgacggtggtgtagacgctgatgcctgcccgcagcagctcctcgatatcctggtagcgcttgcggtgccggctcccagcggcgttggtgtgggccagctcatccaccaggatgagctggggcttccgcgccagggccccgtccagatcaaactcccgcagcgtgatattcttataggggatctccttgttggggagctgctccagcccgtccagcagagccagggtttccggccggacgtgcggctcgatgtacccggccaccacgtccacgcccatctccttggcgtggtgggcggcctccagcatggcgtaggtcttgcccacacccgccgcataaccgaagaatatcttcagctttcccgttctggtctcctctttcagcttgagctcccgcagcagtgcgtccggatccggccgctggtccgtcatggttcccgcctcccctgcataaaattttatattatattatatcacagcttttgttggaatttcgctgcctttttcactttcatataaagattgcgttaagatttcgccagggcatgcgctcacgctcctttacatataaatgaaaaaacggcctatttgagaagggagcggatttttgtatgaagtgtttgatcctgcggcgccggaccctgaccgtgctggcgtgcgccctgctggcggcggccatgtttgccctggtcaacgccccggcagtggcggaggcctccgccaccgaccggcagcttcccatctactgcgttcagcgggaccagaagatgctggccatctcctttgacgccgcctggggcaacgaggacacccagcagctcatcgacatccttggaaaatacaacgtaaaggccaccttcttcgtggtgggggactgggtggacaaatacccggagtccgtcaaggccctccacgacgccggccacgaggtgatgaaccactccaactcccacgcccacatgtctcagctctccagcgaggcgatcgtcgccgatgtggaggcctgcaacgacaaaattgaggccgtcaccggcgtgcgccccaccctgatccgcccgccctacggagaatacgacaacaatgtaattacgtccatccgctccatcgggatggagcccatccagtgggacgtggacagtctggactggaaggatctccccgccggggagatcacggagcgggtggtgagccgggtccagcccgggtccatcgttctcttccacaacgccgccctccatacccccgaggccctgcccgccatcctcgaaaccctgctacaggagggctacaccttcgtccccatctccgagttgattctccccggggaatacaacgtggactacaccatcgaccacaccggccgccagcttccggcgcagccatcgtcatccccccgataagggttcgctgcccggaccttcacctgtgcagccccagcagagcctggtgccgcagatgagctattgattgcttcgggagcaatgatgttgtcttactcatcggccccaggattccccgctgaatgtatggcgcgctttcaggcgaaaatcgaccggcgggaacgggcggcccttttatactgctgataaacatacggttttttacatctcttaagccaggcccccggagcgttttgctccgggggcctggctttcgctcgggcatacgccggagcgaaagccctccataacttttctgaaggtaacccttttgttttggaatttctctcacatgataagctttggtataatgaaattgcacaaaacaaatcgtatatattcttataaagattgggagtgtgcctgccatggaaaagagaattgccgttttgcgcggggatggaattggtccggaagtcgtcaacgaaagtatcaaggtattggagcgggtcgcacagaaatttgggcacacgttccattattatgatataatcggcggtgtcgccggtctggaggcctacggcgatgccctgcgtccgcaggattacgagctggggcgttcctgcgacagcatcctgttcggctcggtgggtgatccccgcaaatacaccttcaccggcgccaacggcaccaaaaaatacccaagccgtaaggaggccgcagtgaaggccctggcttcgttccggcgtggcatggagctctttgccaatatccgtccggccaaggtctatccccaactgatccaggcctctccgctcaaggatacggtggcccgggaactagatctcattgttctgcgggagaataccgcgggtatcttctatgcgggcaagtataggaaggagaccggcggcgaactgaccgcctgcgatgagtgcgtctacacctggtcacagatcgagcggcacgcccactgcgcgtttgacctggccatgggccgcaaaaagcacgtcacgatggtaaacaagcccaacgccatggagaccggcgtgctgtggcagacggtatatgaaaaggtggccgaggaataccctgaggttcactatgagaccatgctgattgacggctgcgccgcccgcctggtgagcaggccggggtattttgacgtaatcgcggcagaaaatatgttcggcgatatcctgtccgacctggccaacagtgccgccggctccatgggtattgccggctccggcgacattgggagcgagggcaagggattatacgagtgcgccggcggctcagcgccggacattgccggccagaacattgccaatcccattgccgagatcctctctgcggcactgatgctccgcctctccttccatatgaccgtcgaggccgacgcgattgaggcggccattgtcaaggttttggacgacggataccgcaccggcgacattatgactccgggaggcaagcggctctcctgcagcgacatgggggatgccatatccgaggcgatctgactgtgggccccggtgcggcctgaaaaagggaggttccgctatgcgcatcgaacagcttatcgcattcgataaagtagtgcagcacagctccttcacaaaagcggctaacgagctctacaccacccagccctctgtcagtaagatgatcgacgccctggaggacgagctggggcaccaactgctgcggcggacgagccgcggcatcgagctcaccgcctatggcaagtgggtttacggggacgtaaagatcattcttcaaatggtgaacggctggcaggaatccacccctctggaggaggttccccgggaggtacacatacagagcaccaccaccatgtgcaattttctctccgcagggtttatcccctgcctgaaggaccggcaccccgacatcaatctgctgctccacgaatgtcggcgcagcgagatcattcacaaaatggaggagaacggggttcacatcggcctgctcccgatccgcaaggaaaatcaggcggactcgaccgccaccctggagcggatccgcaaaaacggctgggactgctgcgaggtgattgaagacccggaatacctgtttctcggctccggccatcccctggctctgacaggggaaatcacgcctcagatgcttgcgcaggtgccccttggcacctattcccatgtaaacgacgacaactggcttctgttcggacactatttcagtggagaggccggattccgctgccacagcaaggacgccatcttgcagtatgtggcgcagaacaggtgcgccgctatctttcccaggtttacctcccagtacgagtattttgtcagccagggagcggtgcagcccgtcatggttcatggactggatttcggacatgccaccttcctgctggtccaccaatcaggaaagtccctgcttcgggaggaacagtcggtggtgtgtgcgctgaagcgatacttcaaggattgtacctgcaaataaaaaggttgaaaggccccgccggtatcctgttgggataccggcggggcttttcacgtatgctccagaccctgctgcatcagaacatgacgtttgccatggggaagatcacggccagaataagaaccagggtgatgccgcagcagacaaggccgtatttcacggcgtcacttccgggaatccactccttttcgccgtggacaatggccgcaggagcactggcgggcggggttgccatacccatattggtggccagcagcacacagaccgccagtgccgccggattggcgccgcaggcgatgcccacactgtaggcgatgggcgtcagcatggctgcggtggcgatgttattagccacgttggtgagggccatacccacgacacacattactgcggtgaggacgagagggctcttgccctggaccaccggcgtgatcagctccaccagccaggccgagattccggtggactcggcggccatggcatcggcgatactcagcgcggcggccaggatgaagatgatggaccagccaatgttcttggagaacagttggacggcaggcatgccctccttcagactgaccatgatatagacgccgacagcgcccagcaggatgccggtggcgcccacattgttcagcaccgtactgacaataaaggtcttgggcacgaaggaggggaacagcagcaggacgatcacggccacaaagaagaccatgataaatttctgataccggctcagcttgggcagctcttccatggatttgttgctggaggcaattacgctgacgtcgcaccggaggacaaatttcatcagcaccagcagcagggccatggtaatagcggtgatgacgaccacgatcgccagataggggacaagcgcgatggagtcgccgccggacatctgggtatagctggagaacaccacggcgggcagagacttgaacggcagcagcatgtagaaggagcagcccacacagattgtgcccaccagggtgatagaggcccacttgctgccgggcttaacgccgtagaggcggcagatctccttgatcagggggaaaattaccatggtggccgcagcgcaggaaaccatgatgaccagcgcgcacatggccaggaagatcatcagggtcagcagatatggcctgccctgcacaaccttgcggctgacgatccagcgcgcgatatactcggtgataccggcggcgctgatgatgttggtaaaggcgaagaagaagaagaacagcagcaggacggtggaattgccgaagccatccctcaggacggcgggtacggtggagtagctgctcaggcccaggaaaagcaggccgaaaatgctgggccagaaggagtcgttggcgatcagccagccatagagcatccccaggaagataccgatcacctccaccccgagaggggtcagcggctccgcggcggggacaaacttgaaacagaccatgattgccagggatatcaggatgtggatcaccttgatcggagtgagattggtcaatccttgctgtgctttcagttgcgtactcacatttgagacctcccttgaaagttgtatttatctcaggctggactcacacacgctccagctccaagattctgcgggcgttgccggccaggaaagcaggctgggccacgggtctcaggcgcccctccaggaagtagtccaccgcctcccgcagggagacataggggtaggcggaaccaaagagcatctgatcccgcaggatatagttcgccgcagccaggtactctccgcttcccgggccgttgaactggtacaaatccggcagcagatagacatttttatagcgatacgccacgtgaatggcctccgtcacccagggccagcctccgtgggagaggatgatgttcaatttgggaaacgccttggccacccgctcggcgtgctccggcttggagtactcgatgtccgggccgcagttggagcccaccatgagcatgacggggacacccagcgcctggcagcgctcatagagcggaaaaatccgttcatcctccacgaacatgggggtcttggtcagtcccggttccatgacgatgccccgcaggccctcgcctacgacgtaccgctccagctcctccatggcctccggtccgtcgctggggtccacccccgccatgccggtaaaccgcccggggtaggcgtggatcaggtccacgatatcctgattgtccacaacgccgatgtgagggagcaccttgcgcccggccagcaccgccatgccgatgcccgcccggtccatttccgttaaagatgcctccatatccctggcagccacagccggggactggttcataccgaacgcctcggaacagcgctttgcccgctccagatcccggtacatgatggtctcccggtagctgccatagggcggacggtaacgaaaatcaatgatatccatgaaaatcactcctgtcccggctgcaggcccaactcagcccgcagctcgtcgttgaggcgccttaccgcccccctgtccggcggctccagtccggccagtggatagctccggcccagctggcggtactttccctccccccagttgtgataggggagcagctcgtagtcggccagcgatgggagcctccgcaggaactgcacgatttcggacaactgttcccggccgtcgttgacgctggggatcagaggggtgcgcacccggaggggcaaatcagggaattcccgggagagcgccatcaggttgtccagaatccgccggttgtccaccccggtgtaccgcctgtgtacctccggagccatacatttgagatcaaaaaagataagctggcaaaagggcgcggccttctggaacgcctcaaagggcacgtatccacaggtctccagggccgttcccaccccctcctcccggaaccgttgcagcagctcggcagcaaaatcgggctgagccagaggctcacctccgctgagcgtcacgccgccttcggcgcgccagctcatgtgctgggccatcacccgctccaccagggtcctggcgtcaagcgcttcaccgatccggctcagcgcgccggagcagcaggcccgggcacaggcaaagcagctccggcaggcggcgcggtccacctgaatccggccgcctgccgccacggcggcggccccggtggggcacgcagccgtgcaggcccggcagccgatgcatttggaagggcggcagctcaactcaggctccgcatgctgtgactccgggttggcgcaccactcgcaccggagcgggcagccctttagaaaaatcaggtcccgcatgccggggccgtcgtggaggctgaagcgctgcacattgaagatggttcccactgcggatcggctcatgccgccccacctcccttctgcggatggtttattcggtgcacatgctggtgtgctcggtgcggttgataatctccgtctgcagcttctcgctcaagtcggtgaagtaggcgcagtagcctgccacacgcaccaccaggttgcggtatttgtccgggtccttctgcgcggccagcagggtctcccggttgacgacgttgaactgaatgtgccacagcttccgatccacaaaggtacggataatctggataaagttctgaataccgctctccccctccaggaatgcgggagacagcttgatgttcagcaggcgctgcatcgtcaggtcgtgggcatggctgttgatggccgccacggcgttaagcgtggtgatggggccgttctcatcggtgccctgggtgggggagattccctcggacagggccacgcccgccctgcgtccgttgggtgtggcaatggtcttgccgcccagggccacgtgggaggccaccggcacaaacttcaggtgcttctgtccgccgtgcatggtgcggtggcggacaatgacgttctgcatcatggcgtcaaaccggcgggccagctccagggcgtgctggtcgccgttggcaaacttgggtgcgctgagcagcttctggcgcatgggctcatagccctcaaagttggcgtttaccgcctggcggacctgctccagggtgaattccctgccccggaatacgaactcatccagggcggagagcgattcgatcagggtgccgatgccaatgacatttaccgcaccgttgtcgatatacaggccgtagtccctgtcacagggctggtgcagatccttcatgttgatccgccccgcctcgctgagggcggaggtaaacgggcaggccagcttcagggcgttgctctgctccagggtgccggtgcgcttcatgatgtggcgcacaaagaaggtaaacgccgcctccaggttgaccatcagatcgtccatgttctgaatctgtccggcggggatgggcgtatccaggaatttctcgtacttcccgtccccgaagtgaacccagccgtcgctcatggccatctccaggacggcggtgatgttcaggttgcacaccgcggccaggtaagtctcatagtcgggcaggcggcccccgcagcagccacaggcggcatagtcgcgggcaatgtgcagcggcacgccggcggcgatgtagtgggtgataaactcctcgtcgttgaagaacttggggcagccgtatcccaccttcaccacctcggcggcggcccggagcagcttatccggggtattggcgtgaacccgcaggctgacatcgggatactggaaggggaactccttcttggagcggaggatgaggtaggtcagtggattggtggcgtcccggccgtcgggggtcaggccgcccagggaaagggcctcaaagtgggtgtagccctcgtggccgcccgccgtgctcttgccctggtaggggaccacctcgcccaccttgataaacatgcattccaggatttccatggcccgctcctccgtgagggtgccatcctccaggcccgccttgtagaggggatagagatactggtccaggcggcccaaacccacaccgccgccgttcatgttctccagccggtagcccacctggaggaaccactgggcctgcaccgcctcatagaagttccgggcggggtgctcgggcacatggcggcagatctccgcaatggtctccagctcggcccggcgtaccgggtcgctctcctccgcggccatcgcctcggccctgtccgcatagcggtgggcatatgtaatcatggccttgcaggagagaatcgcggcgtccagatagtagatcttgtccatctggttgtgcagcaggttgccctcgatgcccgccttcttctcctccagctcgcggatgatgctctccaggccctccctgattaccttttcataggagccggtccagctcagtgtgtgggcgttgttggcctcgtcgaagatgaggccctgggtggcatactcctcgtcgccgtagatcaccctgcgggtctccctggggagcatgttcagatagagctcatgggaggtcttgcccttccagtacggaaccacctcgttgagaacggtatccacctccgcctgggtcatggcgtagcccgccttgccctccgccttgaggatcttgggcagatcacgcgggaactggccgccccgggtctcaggatatagcacacagtagcggcccggaccgccggccgtgccgacaatgagctcatggggctggatcaccacttctatgtgctccatcatgtactggatggccagcgcggtgcggagcacctggggataggcctccgtctgcatcatggactgcgtaaagagcaccgctcgctggatatccacccggggcttccggccgtaaaagcggtcctccatgatcctgttgatgcgcggccgcggagcggagagctgccggccatcctgaatccgctgctccaagtcggtcattacggcggtgtgtgcgtttgcactcatagaacgtccctcctatgtggctgccatactgtctaaattctccagttttacagcgctgagcagccctatttctgtacttatcataaacgacatggctctcagaaacaaattcacagttttcaccgccccattccagaaggttatcctttatttgcgtaccttttgcatggaaaccgttggacgcatatcagttctccagaatgcaaaaagggcgtgtgccgcagctaagctgcggcacacgcccagttggccggagccgttccgccaggaactctcaacaggaatttgccagcgataaaggcccctctggagcccggccgctgtccggtctccagaggggcttctgttcgtcttctctccgctcaaacgcccctcaggtcgccgtccttcatgcacaggtggacggcggcggtggtgaaggtgcggggcagggccaggatgttggggttggggccggtatatttgcgcatggcgtcggccagggcctcctcgaaggtggcgcgggtcttgaggcccatgccgcgggcgatgcccggctcccgggcgcccacgatgtagatggcgctggtgtgctcctcggccaggtggccgcagctcatcatggagaagccatggaaggggtggaaggcgttggcgaagcggtacttgcggatgtactcctccttggtggcgaagtactcgccgtaccggttcatgtcggggaggatgttcatgtagtcgtgctggaacaggtcgtacagctcccgcaggtagggccagcgctcgtcgtggaagtagccgtcgcagatggaggacacgatgaacacgcaccggtcgctcatgatgcgcctatggcggatgacctgggcggacagggcctgcatcatctggatggggttggtgcccatgccgttgccgtagtggaagttggtgggcatgccgaacacgatgatgtcgtacttcttctccgcccagtggacgtaggtgcgcttgtccgccgtcttccaggacacgggctgcatctccctggcccagccggagtgaatctcgatctggcggctcttggtgtccagcacggcgtcgcagcagaagaatttcttgcccatcttctcctccatccgcatgccctgctggtcgaacttgtgccgcatctcgctgttcgtggacacgggcacgaagtcctgccggtgcatcacctggggcacgtggtgggcagagatgctccgccagtgggagatgccggtggcgcagtgcttgtagccgccggagtagccgccataggggttgccctgggtgtggccgatgagcaccgccacgtccgcgtcatagacgtacttgttcatgatcacgtggtccccctgggcggtgtagcccaggtccaccaggtggtcgtagtcctcgctgtcgtggctggtgatctggccggtggggtagaactcgccgaacagctcggggcccaggatggtctgcatctcggccacggtggcccgggggtgcaggccgttggagaacagcagcagcacgtccttctgctccaccccggcggcgtacagctcgtccaggcaggcacggatggccaccttccggtggctggtaggctggttgccccccttgacgatgtccggaatgacgatgaccaccgacttgcccggcccggccagctccttcagcgggggcatgccgatggggttgcggatggacgccagggtggcggcgtacaggctgtcccagtcctggggcagacagggcggatccgctaccgtctccccggggatgaagatgtccgtgctgtcgggcagctccgcgcccagcaggccctgcccatactcaaattccagtttcatgggcttctcctcttttcgtttgcagtttcccggcgctgtcccgcaggccgtggaacaaaacatcgctctccccacgcaggcgctggagttctttcggcgtctccaccggcatgcgttccgccaggaaggcgaaaatccggtcggcttcctccggagtctccttcaggcccagctcctccagacaggtgggcatacccagcgcccgcagcacccggttcagcgcctcctgcgcttcctttggggccccgtttaccgccagttggtagaccagcgtactgcccaccagctccccgtggaggaatccggcggccagttccgggtgcacacagcagaagtagctgtagagggtgtggctcacggcggcctgcttgccgccgcaggccatggcggaaatcacccctgtcacctggagggccgcgcagacacagtcctccagcgccggtgtgatctttccggcccgaagctgctcaattgtctcacacccatgctccagcaagagccggtaggtgttttcagacaggagctgggcgctctgggagaagaggttcttttcccactgattggagaattgaatgttgtagctgatctccgggtatttcgccatggcatccactatgcctgccgcgcagagacgggccggacagtccctgacgataaagtccagctcggctatcacggcaaagggcgggtaccgggtccagttgttccccacgaacgcgccatcgtcggtgtactctaccgccagccacgctgaggcggcgcaggtagccgcagaggtggggacggtgatcgcccgcacccccatatggtcagccgctattttagccgtatccagcgcgcggccgccgcccacgcccaccaccagctccgccccgtatgcctgtccggcctgggccgcacttcgaacattgccggggcagcagtggccggaaaagagccagatctttgtatccacaccgctttgctccaggctgcggagcacacgtgcctccaccttgggccacacggcggcatccgccaccaccagcgcgcgccgccccagcagtacggcgtcccctcccagatgagagaggacgccgctgccttgatagtatcttcctgaacagagctgaatcaaattcccatttctcatatgtacgcctctgatcaagccgcagccctgcgggccgccagcttcttcttaatataggggaagaacagcataaacagcgacagaagaataaagaacaggctgatgggggaggtaaagaacgtcgcccagcttcccttggacacgatgagcgcacggcgcaggttggattcgcacagcttgcccagcaccaggccgatgaccatgggcgtcatgggcatgtccagcttggtcatgaagtagccgaagatacccacgcccaccataaagatggcgttgaacacggagtagtcgatggcataggcgccaatcacgcacagcatgaccagaatggggaccagggtgctggtggggacgcgggtgatgttgacgaagccccggatgaatacccggccctggaggtacataaagatattgacggcgatcaggcccagcataatggtgtagacccactccccgtgctgggtgaacagttgggggccggcggcgataccctgcatggtaagagcgcccagaagcacggccgtgttggtgtcgccgggaatgcccagggtcagcagggggatcagggtggcgcctgtaacggcgttgttggccgactcggaggccacaaccgcctcctcggaaccgtgcccgtattcctcgggatgcttggaggtccgcttggcctcattgtacgccaagaaagaggagatggccgcgccggtgccgggcaccgcgccgataaacacgcccagaatgctggacttgagcagcaccatcttgtatttcagtacgtcgcggaagcgggtcttctccttttccaccttgaccgccgttccggtggccttgttcatgtcccgggccttggccatgatctccgtgatggcgaacaggccgatgagcacgggaatggtatcaataccgccctccatgcgattgataccgaaggtgaagcggctgacgccatccatgggatcgatgccgatgcaggagatcagcagccctacaaagcccatcagcagccccttgatctgggactttccgcccacgctggcaataatcgtcagtccaaagagagccagggcgaaatactcggccgggccgaacttcagcgcaaagctggcaatgggcggcgcggcaaacagcagaaccgcacagctgaacaggccgccgatggtggaggcagacagcgccacatggagcgctttcagcccgtgccccttctgagccatcgggtagccgtccagcgaggtggcagccgaggccggcgtgcccggcgtgttgatcaggatggcggtgatggaaccgccgtagatactgccgcagtagacgcccagcagcagcataacccccgggatggacgccaggccgtatgtaagcggcagcagcagcgccatggccatggtgccagtcaggccgggcagcgcgccaaccataattccgccggccaggccgacgttgatccagagcaggttctccagggtaaaaaggctgctcaaaacggattcaatcatgctcctctcctcctcttaaggcagtctcacggagagcaggaaggtaaatcccgcccagatggctaccgccgcggcatagaccaccgggtaggcccagatctttttcacgcggaaaataagcagaataacggtggctgccagaagcgtggagataaaataccccagaatctgaaacagtgccgcatagaccagaatcacagcggccagcagaagcgcccgcagctcgtcccgcagggcccgctttctctcctcctcggaggcaaaggttcccgtgctgtcggcgccgcccgccttgcggtgcttcacaatggtggtgagcatcagcgccaggctgagaatcaccatgcaggccccgataaaataggggaatacgcgcgggcccatgacggacacgcccggatcttgaatggtcagcggaaccgagatcaataccagcgctcccagtatcagaaagaaaaaggaagcaatcatatcctttttgtattgactcataagctccctcctttgttaaggtattgttctccgggccgcgggccgccgagggtccatggcccggagagcgcttgctatgtgtttggcagagggatcagccggccagcagctcctggttcacggccgcctcctcgttaatacgttccaccatctcctcggtagtcatggtcaggggcaggagctggttggcgtcgcagaactccttgtactcgtcggttccggtgatggcagtcagggtctcggtcaccttggttaccacgtcctcgggggtaccggcgggcagcatcaggaacttccagacgctcatcgtcacgtcatagcccatttccttgaaggtggggatatccttcaggttctcacgtgggtcccgctcgtcgttgaagatgccgatggccacggcgtcaccggactccacatactgcatgacctcgccgggatgtccggtgcagacgtcaatgtggccgcccagcagggccgcaatggtgggagagctgccgtcataggagatgccggttgcctccacgccggccatgccgaagaactgcttctgggacagctccatcaggctgccgctgccggagaagccgtaggtcacggagtccatctccagcaaatcgtcaacgctggtgatgccggagtccttgcccgcaatcataatgatgggctcattggacagggccgccacagggataaagtcgtcaatggtgtaactgacctcgcggacgaagggctgaagggtaaacacgccgatggcctcctgacagagggtgtagccgtcgggggctgcgttcttgaactccgtggtagccacggtgccgcccgcgccgccgctgttctgcaccaccatattgacgccgaagtactcgtcgcgggcgccgatctcggagacaatgcggcacaggccgtcggaggttccgccagcatcccaggggcataccaccgtgatagtgctgcttggatagctgccggtgctgccgcctccctttccggtttcgccctgatctccgcaggccgccagaggcagcgccagcgacagggacagggacagtgcaaggactttcttcaggtttttcataggaatacctcttttcttcttatgatttttgccgcacaggcggcgggttaacaggaataacagagcgcttcccacaggccggccagatagcatacacccatcgcccggtcgtagaggccgtaaccagggcggccccgctcgccccacaccatccggccgtggtcggcgcgtatcacgccgtcaaagcccctccggtgcagggccgccagaatggccgccatattcaggcttcccgaggcggtcagatgtccgctctcacagaagtcctcctccccctcccagcggatattccgcccgtggacaaagggaatcttgccctccgcacagaggcggtctgcaatcttgaccacatcgttggccctgctgctgcccagggagccggtgcacagcgtcacaccgttggatggcagatccaccgcgccggtcaggcggagcagatcctccagcgtggataccacccggggcaggccaaataccggaagaggcgggtcgtccgggtggatggccaggcgtattcccagccgctccgcctctggggccacagcctgtaggaaatagcacaggttgttccacagccccgcctctcccaaggcccggtactggcccagcagcgtccggatttccccctgccgggtggaaaagttccagccgggcagcgtccagacatcccgctccgggttcatgcgctccagcgcagcctggtgaaaggccagggtggcggagccgtccggcaggggctgctccagctctgtacgaatccagccgaacaggggcatgaagttatagcagacggtatgcaccccatggcgagccagccgctccaggttttccacgaactgtccgatgtaccgctcccgctccgggccgcccagtttgatggactcatgaaccggcaatccctccgccaccgagaagtgcaggcctgccgccgcggcccgggcggcccgggccgcgatgtcctcctccggccacagcgctccggccgggatgtgatagagcgaggtgacaagctccgtcaccggcgggatctggcggatatgttccagcgtgactgcgtcctcgggcccgtaccagcggaagccgaaggccgtcatcccacttggcccagaagcttttccaggccctcctcaattgtccggctctcctccccgctcagatcacggaaggggaaccgggccggccccatgtggaagccctgcagctccagcatctttttgtgggccatgacgggcataacgctccgcaccagcccgcgcagcttcagaagcatccgctgtatccgacgggcctgctccagctcaccggcatagtagcaatcccagagctgctggcactgctttggaaacacgctggccatggcgataatcgcgccgtctcctccggactgaaggacggggagcacctgggcgtcgtttccggtaatcagctcgaagccctccggaagttccaggcactggaactcctgaaacgtcaggaaatccatgctgctgtccttcaggcccgccacgttggggcaggtgtcgcacacctcctgtaccaccttgggcgtgatggggttatgggtcatccccggcatgttatacagatacaggggcatcccctccgccagctccgcggccttgcggaagtaagcggtcagagtctcggcgtcatagctgtggtaatagggcgcggtgaccgacgccgcgtgggcgccctcatgcctggcccagtcaaacagctccttcatgtccgccagattcatggccgtggtgttgaacagaatacagctctccggccccgctccctccaccgccgccgtcaggagccttttccgctcctccaacgtcagattaacaaactctccggtggtgccgcagacgaagacgccgtgtactcctgcatccgtaataaattgggtcagccgcgtgtattccccgtagttgatgctcccgtcctcccgaaagggggtcaattggggggcggaaataccgcgcagactgcatattttggacatggagtccctctcctttcctgactgacgctttgtcagtccaaaatagcgcctctggccgccggctccacattgcgggcgtagcgggccagatagccctcagtaaccttgggctggtagggcggcagctcggccagccgccgggcgatctccccgttggagaggtccacgtgcagggtcccggcatcgatgtcgatgtcaatgcggtcgccgtcttgcacaatggcgatggggccgcggcgggaggtctccggggagacgtggccgatgcaggggccgcgggtcgcgccggagaagcggccgtcggtcaccagcgccaccgactcagaaaagcccatgcccaccagtgccgcggtggcggtcagcatctcccgcatgccggggccgccctgggggccttcgttccggatcaccagcacttcgccatgctgtaccacgccgccgtagatggccttgacggcatcctcctcacactcaaagcagcgggcaggaccgctgtgcctgcgcatggcggccgccacggccgactgcttgatcactgcgccgtcgggggccagattgcccttgagtaccgtgatggagccgtggtcgctgtaggcgtcggacacggggcggatcacctccgggttgtgttcaaccacccgctccacattctggcggtgggtttttccgttaacggtcatctgatccaggttgatgagtccgtccagctcgcgcatcacggcgcccacgccgccggcctgatccagatcgagcatcgtatggctgccggagggcttgattttggccagatagggtgtctccgccgacagacggccgatctcctccagagacatgtgcagctttgcctcgtgggcgatggccggcatgtgcagcgtcatgttggtggagccgcccacgctcagtcccacccggaccgccagctccagcatctcctgggtgacgatgtcccggggccggatgtcttcctccaccaggcgaaccaccgccatgccgctctccttggccacccggttcttcttgccgctgaccgcgtgggcgcaggcgctgcccggcatcgtcaggcccatggcctccgcgatgatggacatggtattggccgttcccatcatagcgcaggagccgggggtaggggacatcagcccctccatgtactcatactcctccctggagatctctccgcgggtcagctttcccgccatctccttcagctcataggtgccgtactgcttccccttgtatacggccggcatcatggggccgccggtgacgagcacggtggggaggttgatgcgcagtgccgccataatcatggccggcacaatcttatcgcagccgccgatgagcaccaggccgtccaactggtggccgccggcatagacctcgatggagtcggcgatcacctcgcggctgggcagcacgctgcacattcccacatggccctgggaaaagccgtcgcagagggagatggtgttcacctcaaaggggacgcctcccgcctcccgcacgccgtccttgaccaactggccgatgcggttgaggtggatgtgcccgggatgcatctcgttataggtattgatgacgccgataaacggcttggccaactcctcgttgaccagacccatgccccgcagatgggcccgggggcccgccatgctcaggccgttcactaccttggagcttgggtactttgggtccttataaatcagatccatcggttcactcatgcaaatctgcctccctcatctctctttttcgatacccgaatgggatagtgccagcccagcttctctgtaatgcgggccgcacaccgcaatatttccccagagtaggacagcgccttttccaaggagaagcgatagtccggcgcggcaattccgatggccgccagcacctggttatccacatcaaacaccggcgccgcgatgcacaccacgtccgtatggtgctcgtggttatccactgcgtagccctgaatccggatcacctccagctcccgccgcagatcctccgcgtcggtcagggtcttgccggtgaagcgctcccgtttcacatgggccaggtagttctccagccagctctcggatttccacgccaggatcgccttcccaccccctgtacagtggagcggaatccgtttgcccaccgccgagtgaagccctacggagctctttgcccccagctttgccagatagatggcctccatatcctcctccccgatgaggtggatggtctccaggctcagatcgttcagataggccatctctcctctggcggcctcatagagaaagtttgtcttttggagctgtatggccagcaggcgcgcctcaaatcctgcccggtagcacttttttacctcatccttgatgacaaacccgcagtgctgcatctcctggagaatccggtgggtggagctgggcggaatccccgtggcaacggagagctgggccagcgaaatctccccctcgcagtcggccagcgccaccaggagctgcagggccttcatggagctgtaggtccgcatcaattcctgcaattcttttttgtgatgcatagcgatctcccaaacattctatatatagaaaaactaatttatatttgattttcgtttgtatattaactcctttttttcgccatttcaaggcacaaaaattggtcaatattttccaaaaaccagctttttttgcaacatttcaaatatggaaatcatatgcgatatgagggacgccctttcgttttatttattctatatacaaaatttctttctcaaagtgcacaaaaaaaataactacttttctcccctccgttccggggtgcatagcctcttctcccacctgtcggaccgtcccgctcaacaggagtcctcccgctctgcaagtcaaaaaagtgactcaaattttgtatattatttacaattttaaggaatatcacaaaaagtctgcaaagtgtcttgactgtatttggtcaaaatgttatactcacctcgtcaaatgtaaacgattacatcagaggtgaaacaggatgcgtgccccaacgatttcggaggtcgccaaaaccgcgggcgtctctgtcgctactgtttccagagtggtcaacggcagtccctcggtgtcccatgagacccaggcgcgggtgcaggaggccattgagcggctgggctaccagcccaacgtgtggggccggagcctccggcggggcgagagccgggtggtgctgatcatcgtaccaaacgtaagcaacccctactacgcccccatcatcgccgggacggaggaccggctccacgaggacggctacagcggcatgctgtgcatcaccaatgccgaggcggggcgccgggcgctttacctggaatttttgaaggacggccgggccgacggcgccattctgatggagccggcccgggacgacccccatgtgaccggcatggcccgccactaccacctggtacagtgcagcgaatactgcgacaaccaggcggtgagccatgtgtcggtggacaatctggccgccgcccgggaggtggtgctcaccctggccgggctgggccaccggcgcatcggctttgtcggcgcggacaacgacttcatgtccaccatcgcccgccggcagggctatctggacgggctgcgcgttctgaacatccccccgcgggaggacgaccagacctttgccggacgggattacagcttttcctccggcgtggaggccgcccggcggctgctggcccggccggagcgccccacggccctgttctgcatctccgacgtgctggccctgggcgccgtgcaggccgcccgggagctgggcctccgggtgccggaggacttgtcggtggtggggtttgacgatgtggagtacgccgtgatgggccaccccaggctgaccaccgtgcgccagccctgctacgagctgggccggacggcaggggagcttctgctcacccagattcagggcgggccccgtggacgggcggtctatctcccccacaccctcattgagcgggattctacggcacggtgtgccgttggatcataaaggaaatggatctcaatatttaaggaggaaacaagcatgaagttcaagaaactggctgcgctcaccctggccggggccatgtccctgtctctggccgcctgcggcggcggcggcggtgacaccgcctcccctgcccccaacaccgggtccccctccgccgccaccgatacccccgcgcctgagggcgaggtctacaagatcggcatcctggcccccgccgtcacccacggctggtccgccggcgtggcctactacgctgagcagcgttgtaaggagctggccgacgagggcaagatcgaatatctggtgtctgtcagcaatgacgccgcccagatgaccacccagctcgatgatttcaaaacctggggcgccgacgccatcgtggccttcccccagtgggagggcatggaggctcccatccagcaggccattgacgagggcatcaccgtggtgaacttcgacatcgccatcgaggccgacggcgtgtaccgcgtgtccggcgacaactacgacatgggctatcagagcgcccagtacatcgtggacaagatcggcaccgagggcaccgtggtcatcctggacgtgcccacctccggctccgtggccgagctgcgcaagcagggcttcaccgagcacatggctgagctggcccccgacatgaacctcgtcgagtacgcaacggaattcacccgcgaggccggcctcgcggacatggcggacattctgaccgccaattcccagattgacgccgtcttctccatggacgacgagacctccatcggcgtcctgcaggccattcgcgacgccggccgcaccgacatcaaggtcatcaccggcggcggcggcgcccaggagtggttcaacatgatgctggccgacgagaaccaggacatctggctgcagtccgccctgtactcccccgacatggtggaggacgccgtggacatggcgctggatattctgaacggcaacgcccccgaggaccccgtgaagatcatccccaccaccattctggaccgcgacaccgtggagtcccacctggacgagaactctccctactaatcagatttcccgctgataaaggggctatggcaccagccatagcccctttcccgaaagaacagaaatggatgtgatcccatgacactggagatgcgcggcatctgcaaatccttcggttccaacgacgtgctcaagcacgtggacttctccatccagggcggggagatctgcgccctgctgggcgaaaacggcgcgggcaagtccacgctgatgaacatactgggcggcgtgctgcccgccgaccgcggtgagatcgtcatcgacggcgccgcggtccacttccgcaccccctcggactccctcagcgcgggagtcgcctttatccaccaggagctcagcctgatcaacgatctggccatctacgagaacatgtttatcggccgggaactgaaaaccaaatacggcctgttggacgccaaaaccatgattcaaaagacccaggaggtctttgaccgcctggagctgaacctggatccccgcaccatggtgcgggagctggacgcgtcctacaaacaaatcgtggaaatttcacgcgccatgatgatggaggcgtccctgattatcatggacgagcccaccacctccctgaccgacccggagattgagcgcgtgtttgatatgatgcgtatgcttcaaaagcagaacgtggccatcgtcttcatctcccacaagctcaaggaggtcatggaggtctgcaaccggtacaccgtgctgcgggacggcaacatggtggccgccgggccggtggccgaggtgaccacctccgacctggcccggttcatggtgggccacgacgtgcgcaccgagaacctgcaccaggacaaggagctgggcggcgaaatcctccgtggggaggggctgggcgacggcgcccacttccgggatatctccttcaccgtccacgccggcgaggtgctgggcgtcaccggcctgctgggcgacggccgcagcgagctgttccaggccgtcttcggcgacctgccctacaccgggcagctctttgtggagggccggcccgtcaaggtgacctccaccccccaggccatccggctgggcatcggctatgtcccccgcaaccgcaaggagaacggcatcatcaaggacatggatatcgtggagaacggctccatggtcaccctcccccggctggcccgccggggcctcatcgaccagcgccgccgggacgcggagtttgaccgccaggtgggcgagctgcacatcaagatgggcaaaaagaccgacctcatcaccagcctgtccggcggcaaccagcagaaggtggtgctggccaaatggctgtccgcccaccccaaggtgctgattctggacaaccccacccagggcgtggacgtgggcgccaaggaggagatctacgacatcatcctgcggctggcccgggagggcgtggccgtggtggtgctgtccagcgaggcccaggagatcatccgcgtgtgcgaccgcgccctggttctgtaccacggcgccctccagggtgaggtctccggggcggacatgaacgagcagaccatcatgcacctggccaccggcggcgcggcgccttccgcacaggcaattcatacagaggagtaacggctatgggaacgaaagaactggaaaagaaatcctccggcggcggactggtcgccgcctggaagcagaaccccctggtcagcaccggcctggtgctgattctgatgatcgtcgtccagaccgccatcatgatctacaactttggcgagggcagcgtgggcgagctgctgctctccctgctgaccaactggctcaacatcctgcgcaacaacgcccccgtgggcatcatcgccctgggcatgaccttcgtcatcatctccggcggcattgatctgtccgtcggctccaccctggtggccgtgggcgccatggtcatgatggtggtggacggcagcgccaccggcctgctctccggcatgggcatcaccggcgtgcccgcctacatcatcgccatcgccgtgggcctggtcttcggcgcgctgctgggctggctcaacggcgtgctcatcgcccacggcaagctgccccccttcatcgccaccctgggcaccatgcagatcttccgctccgtcacccagcacctgacccagcacgccaacccctccgtgcccaagggcttcctccagatcgccaacctgaaaatcggcagcttctacatcatgcccatcctctactggctggccatcgccgccgtcctctatgtggtgtccaagcgcaccaccttcggccgccatgtgttcgccgtgggctccaacatccgcaccgcccgcctgtccggcatcaacgtcaacaaggtcaagcgccgcatctacatgctcaccggcatgctggtggccatcgccgccatcatccaggtctcccgcatcggctccatggactacgccagcgccggcagcggctatgagatggacgccatcgccgccgtcatcgtgggcggcaccagcatgtccggcggcaagggttccatcgtgggcaccgtattgggcatgctcatcatcggcgtgatgaacaacctgctgaccctctttggcgtgccccccttcctgcgggaggcctgcaagggcgtcatcgtgatcgtcgccgtgctgctccagaagaaggaagccgacgcgtaagagaaaggagcatcccacattatgttcaatatcggcatcatcggctgcggcaagattgcccaggtgcgccacatccccgagtacgccgcccaccccgcggcccggctggccgggtactacgacctcaaccaggagcgggcccaggccctggcggagcagtggggcggccaggcctaccccacctgggaggcgctgctgaccgacccggccatcgacgcggtgagcatctgcgcggccaacaccgcccacgcggagctgaccatcgccgccctgagggcgggcaagcatgtgctctgcgagaagcccatggccaccaccttggccgactgcgaggccatggccgccgccgcccgggagagcggcaggttcctcatgatcggccagaaccagcgcctgacaaaggcccaccagaaggcccgccagttggtggcggacggggtgctgggggacattctcaccttccgcaccaccttcggccacggcggccccgagacctggagcgtggatccgggcaagaacacctggttcttcgacaagagtaaggccgccatgggcgccatggccgacctgggcatccacaagactgacctcatccagtacctgctgggccagaccgtggtggaggccaccgccaaggtgaccaccctggacaagcggggggccgacgggcagctcatcggcgtggacgacaacgccatctgcatctaccgcatgagcggcggcgccatcggcaccatgaccgccagctggacctactacggcgcggaggacaactccaccgtgctctacggcacaaagggcatcctgcgcatctacgacgacccggcctactccctcaagctcatcaccgccggcggggagaaggtgctctacgagctggaggccatccagaccaacgacaaccagaccgcctccggcgtcatcgactgcttcatggactgcctgaccggcaacacgccccccgccatctccggagagtcggtgctcaccgccatgcgggccgtgtttgcctgtctggagtcctcccggacaggcagggcggtgtccgtcgcccaggattaacgaaaggagttttcacaatatgaaacttggttttgtcagcgccatcctggacggctggagctttgaggagatgatcgacaccgcccgcgacctgggcttctcctgcgtggaggcggcctgctggccctccggcaaggccgagcgccgctacgccggggtgagccacatcgacgtggacggcctcaccgacgagaaggccgcctatatcctgggctactgcaaggagcggggcgtggagctctcctccttggccttctaccccaacaccatggacgaggatctggagaagcgggcggccaacatcgcccacctgaaaaaggtcatcctggccagcgagaagctgggcgtgggcatggtcaccaccttcgtgggccgggccacccacaagaccgtggaggaaaacctggagctgttccgggagatctggccccccatcgtcgcctttgccgaggaacaccacgtcaaggtggccatcgagaactgccccatgtggttcgacgccaccaactggcccggcggccagaacctcttcaccacccccgacatctggcgcaggtgctttgaaatcctccccagccccaacttcggcatcaactacgatcccagccacttcatctggcagcagatggactacatccgccccctgtacgagttcaaggaccgcatcttccacgtccactacaaggacatcaagctctaccccgagaagctggcccgggtgggcgtcatggcctacccccttcagtatatggagcccaagctgcccggcctgggcgacgtgaactgggccaagtacgtctccgccctcaccgacatcggctacagcggatacacctgcatcgaggtggaggaccgggccttcgagggcagccgggagcgcattctggactccctgcgcctgtccaagcgctatctggagcagttcgtcatttaacgccagcgggggccgcctgcggcgcccccccttctgaaaggaaggatattatgggacgcatcatcgcggtcaactccaactgctaccacggctattccattgagcaggccatcgacggcatcgccgccgccgggttccgctacatcgagctcaccgccaccaagggctggacggagcatgtgttccccgaccagagcttcgagcggctgtggcaggtgaaggagcggctggccgaaaagggcctcacccccttctccatgagcggccactgcaacctgatggacaccgggcgcatccacgactttgtcagcaatatccgcctggccgccttcttcggctgcggctacatcgtctcctccatcggggaggcccatctggcggatcaggccgtggcctccaacgaggtggtggcggagcacatccgcgccctggtgcccgagctggagaaatacggcctcaccctggtgctggagacccacggcgaccacgggagcggcaagatcctgaaggaaatcgtggatcgggtgggctcccccagggtgggcatcaactacgacaccgccaacgcccttttctacggcaacgtggacttgggggcggatctggacgccagcatggacgccatccgctacatgcacctcaaggacaagggcggcgagcggacggtatgggacttccccgccctgggcaagggctggctggacttccccctggtcttcgacaagctggcaaaggcgggcaacgactgccccttcagcattgaaatcgagtttacccaggccggagcaaaggatctggccgagatcaatcaggccgtgaaggactcggcggagtacctcacagcccacggcttcgtcctgtgaggtggcggccatgatcaacatcggaatcgtgggcgcgggcggcatgggcaccgtgcaccacagcaactatctccacctggacggctgcgccgtgacgggcgtggtagacccctcccccgccgggcgggagcaggccgcccagtggggcgtgccctgctatgagagcattaccgacatggtggaagccggcggcgtggacgtggtggacatctgcacccccaccttcctccaccgagacaacgtgatggagagcctctccctgggcaagaccaccatcgtggaaaagccctgcgccctcacccgggcggatgccggggccatgttcgccttggcggaggagaagggggtaaacctctatgtggcccaggtgctccagttcacccgggaggtggaggtgctgcggaagctggtgcgggagggcacctacggcaggcccctggacgcggtgttccagcggctgtccgcccgtccggagtgggcccagggcggctggctctttgacaagagcaagagcgggctggtccccttcgatctgcacatccacgatctggatgtgatcgtctccctcttcggcgtccccgaccgggcggagtgccgcccctgcggcggcccggccatggactccccggagctgtaccgctgggagtaccgctgcggcggggtcaacgtcatggccgaggcgggctggctcaacgcctccatccccttcaccgccgtctggcgggtctactttgagaacgccatggtgatctatgacggcaataccgtcaccgcctacccccacggctcagagccggtggtcttcgacacggaggaggccgtcaaaatccccaccggcatcaacgtcccccccaccggctggtactacgccgagctggggcacttcctgtcctgcattcgggcgggaaagccctcccccctggtgccccgggagcgcatcctggcggtgctgggcctgctggagaccgccctggaggcggacggatcaaactgaaaaacgctccccgcgcgtcaaccgcgcggggagcgttcagcctgtcgaaaaagtcttttcgacaggcttccggactttttgaccctttaaaaaggttcaaaaagtgatttgatccaacgcgaaagggaaccctgacggttccctttcacactatccctccctccgaaccatccggctgggagttttttcagtttcaacgctccccgcgcgccagccgcgcggggagcgttttatcttttctttattcgtgtttgctccgggctcagccgatcgcggccttctgtcccggatgatcggttcccatggtggatttgaggttgtagcgcacatcctccatgtgctcctccatgcactggcgcgccccctccgcatccccctcgatgaccttgctgaacagggcctcgtgggccacaatggagctatacgagatgccgctgttgttgatggtgaactgccgggagatatccagcagctcatagaggtactcgtagacgctggagagcacagcgttgtgggcggccctgaccagggcctggtggaagccgtgggagagcttgcgcaggttctgcaccgactcctcggtgccgtcgttgaccttcttggcctcccgcatgtcccggagcagcttctggatggaggcgatatcctcgtcggtgcgccgctgggcggcgtgataggccgcgaaggtctccagcacgatacgcagctccagcagatcccggatggtgtccgccgtggcgtcgaaggaaaaatccatcttgctgaccaggctctgcgcggaggtgttcttcacataggtgccgtcgccggggctgctgtccagcacccccatatactccaggatcttgagcgcctcacggatggggacacggctgacgttgaacttctcggccagctcccgctcggagggcagcttctggcccgcctgaagctctccatcggcaatcatctggcggatgttgtcaatcacgtactcgtagaagcggccgctgccgtccgcctgcttggttgggagattcatcggactcctccttttatcctcaagtactttttccttattttatcataatctgaggtcaaatagaagggatctctcaaaaaatccccctgccggagtcaaaggcggatgatgccatgcttggccttgctctgggcgtaggcctgctccacatactcccgcagctctggacggaacttggggtgggcgcagttctcaatcaggacatgggcccgctcgtaggccgtcaggccccgcagatccgccaggccctgctcggtgacgatgatctcggtgtcgtgctccgtgtgatccacgtgggccacgtggggcacaatacaggagatggcgccgtccttggcggtggaggcggtggagaaaatggcgatacccgagttgcgggcgtagtcgccggagccgccgatgccgttcatgacggccccctcgccgatgtgggtggagttgacgttgcccgccagatccacctcgatggcggtgttcatggcgatgatgctcaggcggcggatcacctcgggggcgttgctgagctcctggggccggaggatgatcttgcccttgtagtcgtcgatatgggcatagaaccgctcccgggcggagggggagatggtgagggccgtgccgctggcgcaggccaccttgcccgcgtcgatgagctccaccaccgcgtcctgcatgacctcggtatagacgctcaggtgctccagctcggagcgggccagggcggagagcaccgcgttggccacgccgcccacaccggactgcatggggggcagagggttaggcaggcggccggccgccacctcgctctgtaggaatttgacaatatggctggcaatggcctccatatccggggtgggggcagggagatcctggttggtgtcctcgcagttggtgaggatgaccgcggcgaccttgtccgggtcgcaggccagatagggggagcccacccggtcgtcgggcttgaagatctcaatggcctgggtgtggggcgcccgctccagggtcaggatgtcgtgcatgccctccacctccagggggatggcctcgttgacctccaggatgagcttttcggcatacttcaccagggtatcgtcaatgcccaccgagaaggggagcaccagactgccgtcggcccggatggcggccacctcgatgacggccacgtcgatcttccccaggtagccgtttttgatcaggtaggggccgtggctcacatgggtgtccacatattgaatccggtcggcgttggccagggcgcggagatcccggttgccctgaaagccataccgccgcttcatcacgccggagcgggccagcactccgtccaactggtcgcccacgttgcccccggtgattacggtgatgcccagctcctcgccctcctcggcgcgccgggccagctcaaccggaagcaccttgggatagccgatgaccgtaaagccgctgaagcccacggtcatgccgtttttgatatgcgccgccgccgccctgggagtggtcaccttgcgtagcagcgcctcgttgcaaatgcggtccattcggaataccgatcctttcttttttctctaattggtataccattttgaggaaaaaaagcccggcggagccttgcggttccccgccgggcctcaaacgagggctcttgttcagtccgccagctccagaagcgtggcgccgccctggccgccgcccatgcacagggtggcaatgccgtaccgggtgcgggtgcgcttcatgccgtgaaccagggtggtcaggatgcgcccgccggtggcgcccagagggtgccccatggcgatggcgccgccgctgacgtttaccttggccatatccagccccagctcgcggatcaccgccagggactgggccgcgaaggcctcgttcagctcgatcatgccgatatcgtccagtgtgagtcccgccttctccagcaccttgcggacggcgggcaccgggccgatgcccatgatgcggggatccacgcccacgatggcgtgggccacgatgcgggccatgggcttgacgcccagttccttcaccttctcgccgctcatcagcagcagggcggcgcccgcgtcgctgcgcccgcaggagttgcccgcagtgaccttgccctttccgtcggtgcggaacacgggcttgagcttggccaggccctccatggtggtggccctgggctgctcgtcggtgtcaaacacgatgggctcttttttccgctgggggatcaccacggggacaatctcatccttgaacacgccggtggccaccgcctcggcggccttgcgctggctgtggaaggcaaactcgtccatatcctcccgcgagatgtggaactgctcggccacgttctcggcggtatcgcccattccgaacacgccgtaggtctcctggggctgggcccgcttggccccctccacgatgggatccaccagcacattgttgccggtgccgtagccgtaccgggcgttccacagctcgaagtgggtggcgctcatggcctccacgccgccggccaccgccacgtctacgtcgccgcagcggatgtcgttggccgcgcagttgaccgactggagggaggagccgcactgcatcatcagcgtataggccggaatctcctcccggaagcccgccatcagggcgcacacccgggcgatgttggaggccacggcgttctgcttcacctgggcgatgacgacctcctccaccagctcgggggccaagccggtgcgctccatcagggccttgcacaccagcccccccatctcgtgggcctgggtgttcttcagcgtgccgcccatgcggcccacgggagtgcggacggcgtctacaatataaacctcgcgcataaaagcgtcctcctttttgtgttcaggcccgtgcaatgccctgctccctggcctcctgtgcgacggcgcgggccacggtgtcggccacggacttgtccagggcggagggcaggatgtagtcggcgctgagctgctcgtcggtcaccagggcggccagggctctggccgcgcggattttcatcccctcggtgatctcccgggcccgcacggccagcgcgcccttgaagatgccggggaagaccatgacgttgttgatctggttgggaaaatcgctgcgcccggtgcccaccaccgccgcgccgccccgcttcgcctcgtccggcatgatctccggggtggggttggccatggcgaacacgatgccgtccttcatggtggacaccatctccgccgtcaccaggttgggccgggacacgcccacgaaggcgtccgccccccgcagggcgtcggccagagcgccgtgctcgtgattccggttggagatgtgggagatctcctcctgtccggcgttgagcccctcatccccctcgcagatgatgccgttgatgtcgcacatgacgatattgccgaagcccatggagatgagcagcttgccgatggcgatgccggcggcgccggccccgttgatgacgatcttcatctgccccatctgcttgccggtcacccgcatggcgttgagcagggcggcggccaccacgatggcggtgccgtgctggtcgtcgtggaacacggggatgtcgcacacctccttcaggcggcgctccacctcgaagcagcggggggcggcgatgtcctccaggttgatgccgccgaagctcttggagatcagggcgatggtctccaccagcttgtccacgtccttggtgtccacgcagagggggaaggcgtccaccccgccgaactccttgaagagggcgcacttgccctccatcaccggcataccggcggccgggccgatgtcccccaggcccagcaccgcggagccgtcggtgatcaccgccaccagattgctccggcgggtgagggtaaaggacttctcatagtcctttgcaatttcccggcagggctcggccacgccgggggtatacagaagggacaggtcgtcccgggtctcgatgtgcctgcgggccaccacttcgatcttcccccgcagttcctcgtgcagcttgagggattcctgattgacgtccatagtacgtttttcttcctttctgcggcccgctcagaccatctcttcggggtggaacacctcgtcgaaccgctcggcggtgaggaagcccaggctgacgcaggcctccctgagagagatgtgctcggcgtgggccttcttggcggtcttggccgcgttgtcatagccaatgtaggggttgagggcggtgaccagcatgagggagttgtgcaggttgtggcggcacttctcccggttggccgtgatgcccacggcgcagtggtcgttaaaggagcggatgcagtcggtgagcagccgcgcggactggaggaagttgtagatgcacaccggcatgaacacgttcagctcgaagttgccctgggaggccgccaggcccaccgccacgtcgttgcccatcacctgcaccgccaccatggtcaccgcctcgcactgggtggggttgaccttgccgggcatgatggaggagccgggctcgttctccgggatatggatctcccccaggccgcaccgggggccggaggccagccagcgcacgtcgttggcgattttcatcagatccgccgccagggccttgagcgccccgtgggcgaacaccagctcgtccttactggtgagggagtggaacttgttgggggccgtgacaaagggcttgcccgtcagctccgataccgcctcggccacggccgtgtcaaagcccgcgggggcgttgagcccggtgcccacggcggtcccgcccagggccagctcccgcaggccgggcagcgccagctccaccatcgccctgtccttctccaggctggtccgccagccgctgatctcctgggccagggtgatgggcaccgcgtcctgcaggtgggtccgcccgctcttcaccacgtccccgttctccccctccagccggcgaaaggtctccaccagcccgtcaatggccggcagcagcttgtcctccagcgccaccgccgccgcaatgtgcatggccgtggggaaggtgtcgttggagctctgggacatgttcacgtggtcgttggggtggagcagcttcttccccgccagctcgttgccccggttggccaccacctcgttcacgttcatgttggactgggtgccgctgcccgtctgccacaccaccagcgggaagtgcccgtccagcttccccgccaccacctcgtcgcaggcccggctgatcaggcccagcctttcatcgtccagcttccccagcctgtggttggccagcgccgccgccttcttcagaatcccgaaggcccgcacaatctcctccggcatcttctccgtgccgatctggaagttctgatagctccgctgggtctgcgcaccccagtagcggtccgcagggacctccatctcccccattgagtcccgttccatccggtagtccatcctgtctcgcgtctcctttcgtccgccctcaggcgggataggcctcgtcgatcttgtgcagcgcggcctctttcagatttttgtagatgctctgcccgtgggtgtccatgcccaccaccagggggccgaactcattggcctggaggtcccacacggcctctggcatgcccagctcaaaccaggtcacatcgttaatgcgctcaatgccctgggccagcttggccgcgcagccgggggccgcctggaggtacacgtatccgtactggccgcaggcccgcagggtatcggcgtccatgccgccctttccgatgaccgcccgtacccccatccggcccactacatcggcatagggctccatacggatggaggtggtggggccgatgacgttgagccgccaggagccgtcctcgtttttcagggccaccgggccggcgtggaacaccgcagcgccggcaaagtccttgggcaggggcttcccctcctccagcaggccgcggatacgcaggtgagccatgtcacgggccgtaaatacatgcccggtcagatacaccacgtctcccacgtgcagcttgcgcatgtcctcttcctggagaggtgtggaaaaatgataagtagccatccttactatactccttttttgccgttttggaaatcagagcagcttctcaacgcggccgtcgttgtagatgcggataccggcccggcgggccacccagcagtggaagttgatcgccaccggcgcgatggcggtgtgggtgtgggcccgctccatcttgagggccaggcagacggtgtcgccgccggtacccgccgcgcccaggcccaggccgttgatggcgtccttcagctccgcctccagcgcggccagctcggggtcggggttcacgtcgtcccaccggcgggtggagatggccttgcggctaagcttggcggcaatgtccatctggccgccgatgccgatgccgatgccgtagggggggcagggcttgccgccggcgttgacggcggtctccaggatgaagcgcttcaggccggagaggtttttgcccagcttggcggtggtcataatctgcatggcgttgcccagctcggcgccgcagcccttaaagctgatgatgaagtcgacgtatttctggccggggtggtattcatactcgatattgggcacgcccttgccggtgttgtttcccgagttctcccgggtcagggggtccaccatggaggggcgcaggtagcccttcttcgtggcctcggccacggcctccgaaacggcctccctggtgcactccggcaggttgccgtctccaaaggagagccaggttgtggggtagccgggagactggcacaccgccttgtccccctccttggcgatggacaggttgtccaccatggagcggagcatgctctgggcggtttcattcgtttcccgggccagtgcgtctttaagcagccccttcacatcggcggagatctcggtcacggcgcggataaccgcgtcgtgaatggcggatttgacaagtgcttcgttctgattcatagcgcaatgctccattcgtaaggtaatgggcgccgccgttccggcggccgcccgctgaggcagggcttacagcccctcaaacagccggtttatatcatccagctcctccaggtgcggcagccgctcaaccagcgcggcaacccggtccgggcccagaaccccgtcggccagggtgtgaaacttctcgtgctcataggcccaggtaaaggggttattgaagtcgccataggggtactccacctgacgggtgagcacccggccgtcctccagagttacctccaaccggtgggcccaccggttgcggtccgcctgatagctggcctccagctccgggtcgcacaccagggtaatcttgtccatcagccgccgcacccgtgggtcggaggtggcctccggcgtgaaggcggactcccccaggtggccgtacaccagcatggccgcggtacagtactggccgctgaatttgtagccgtagggggtggatggctccggattgtccaccgtgttgactgccacctgataggtgtgatccacaatgcgggtgatgtgctccggctccagccggtgctccccccgcagcagttgggcgcagtagtccgccgcgtgggtgtggcgacagcaggcgtagggcttcagggagttggtcagcagggcgcagttgtcccagctcaacgcccgcgtcagcgcctccgggtggttatccggcgtcatggcgcccagcaggccccggtctcccgccagaatgtcctccgcagcggtaaagcccagcgccgccaggcgtgccgaccgcaggccgcagagggtaccgttggcggtgtgcagggtcttgctcatggcgccgtcctccagaaactgccacaggccggccgcctgcgtccccgccgagccaatggcgtgcagcagtttctcccggtccagccccatcagcttgcccgccgccacggcagagcaaagcgcccccaccactccagtggtatgccagtagtggtaggagcctgggttgatggcctcccccacccgtgcgccaatctcgtagcccgcggcaatggcagccagcacctcacgcccggagcggtgaagcttctgccccaccgccagcgccgcggggatggttaccgcccccaggtgggtgatagaggcgttgtgcacgtcgtccatatccatgacatgggcgcacgcggcgttcagcgcggcagcatgttcgcaggagagccgctccagtccgctgttccaggcggtcgcctcctgctgtccgtccccggcggcaaagtagctgcgccagatacccccctgcggctgaactgagccggctgccgccacgccgagcagatcctccagatagagctttgcgttgtccaccgctttggagggcagactatcatagcggacttcatatagaaaatcggaaagctgttctgtaagcattcggacctcttcctggctgtcccattggtccagccaaaacgcgcaccttatcggaataccgcaccatgtcattccggtattccgtgtaatagcaggcgcacatatttttctttttatgtagtatttttttgctaatattccatttttatctcttttttgcttttcctctggtataccaattcgaattatagcagattcactcagcaaagaaaatacacaaaataaaaatcgttacatttgacaaaagccgtcgcttttccttggttataacagagaaatggcaagttgcatctttacaaattgtatgcataagtgctatattggctccactggtataccgattctccaataaagcacgcaatttaagtcgttttgatggaacggaaagggatatccaattatgaaaacaaacaagcttatgatcacctgcgccctctgcggcggcggtaccacccgcaagcagtccccctacgtccccctgacgccggaggagctggtcgccgattctctggccgcagttcgggccggcgcctgcatcctgcacatccatgtccgcgatgacgagggcgcgaacaccatggagaccagccgctttgtgcaggtggtctccatgatccgggaagccctgcgcaccaaccacctggatgccatcatcaatgtcaccacctccggcaccaagttctccgaggatatgcgggtggcccacctgcccatcctgatgcccgagatgtgctcctatgaccctggtaccctcaactgggccaacagctacatcttcctgaacacgccccccttcctggagcggctgggcctgctcacccaggagctggacatcaagcccgaaattgaaatctttgatgccggtatgctgggcaacgtggattactacctgaaaaaaggcgtcctgaaggccccgctccactaccagctggttctggatgtccctggtggtatgccgggcaatattgactcgatcaaccatctggtttccaagctgccggagggctccacctggtcgatcaccggaatcggcaaggcccacatgccctgtatgctggccggtctggccgccggctgcgacaacctgcgcgtcggtctggaggacaacgtgtttatgaagaagggcgaatacgccaccaacgcccagttggtggagcgggcggtcaagcttggtatcctggccggccgtgagattgccaccgccgccgaggcccgcgagattctcggcatcaagcctgagaagggcgttctttatcagccgtaaattgacttggaaaaggagaatgcgcgatgaaatacgattttgaaacgattattgaccgcgatccggccatccgcggcaccggaaagtaccgcatcatgaaggactccaagggcaataagccccccaagggcatcgttcccctgtcggtggccgacatggagttccgcaccgccccctgcgttattgacgcaatcaaagccgaggcggacttcggcgtgctgggctaccaccgcctgaccgacagctttcgggagtcctgctgccagtggatgaaaacccgtcacgattgggacgttcagcccgactggatcgtccccttcgagcaggtggttcccgccctctataacgccgtctggacctttacccagcccggcgacggcatcctgatccagacccccgactaccatcacttcaccggcgctaccgtaaacaccggccgcaaggtgctggaaaaccgcctggtggcggacgagaagggccactataccgtggatttcgacgacttccgtgagaaggccaagcaggccaagctgttcttcctctgctccccccagaatcctaccggccgcgtctggacggaggaggagctgcgcaggatgggcgagatctgcaacgagtacggcgtcatggtggtggccgacgagatccaccacgacctgatccagcccggatacaaacacattgtgtatgcctccctgggcaaagagtttgccgacaactgcgtagtctgcacctccctgagcaagacctttaacctggccggcctgtgctacgccagcatcatcatccccaacgacgaggtgcgggccaagttccagaagcagatgggcctccaggccttcatgcacatcgagcgcttcggccccgtggcccacgaggccgcctaccgccacggcgccgagtggctggaagagctcatccaggtcatcaagggcaactacgagtatgtccgcgacttcttcgcccagcacttccccggggttgtggtcaccgagctggagggcacctacctggtttggtgcgacttccgctgcttcggcatgagcgacgcagacatgaaggtgttcctcaccgacgagtgcatgctctacctggacaacggcaccgacttcggcgcggccggttccggctaccagcgcatcaacgtcgcctgcccccgcaagaccctggcagacgctctggaccgcttctatcaggccgccaagaagcgcggcatggcccggtaatttccccggaaacacgaccagaatggattaggaggctatgacatgttagagaaaaaggtaccgttttgtatcgaccacttcagcatcgccactacccaccgcgaccgcccgatcgacctggtgaccaagctgggctttaccaccgccgactgctacaccgaccgcaccgtgcacttcatctttgagaactcctactttgagctgtgcacctaccagttgaacaccaccatcacctggctgacccagtccgtccccgccaccaatctgcccaaggtccactcctatcgcctgagcgtcaaggggactgaccccaatcccatgcgcaacgctttgatcgagggcggcatcgagaccatcggcgagatcaacaaccccttccgccagcatgtccgctacggtgagaaggagggcgaggccggttaccagaccttctttattcagaactacgagccctttaccgacattctcttcggctgcaccacccatctggccaaggagctgatcgtcaagaacgagaccaaattcccccacatcaacggcgccaagcgcctggcctacatcaccggctactgcgacagcaaggagcgctttgaggaggccgatgccgccatctccaagctctacaacgccgccaagggggccactgacaccggcttcaacctggacacttatcagctggtggatcacgacgcctacgtggccgagttcggctgcgagccccgcaacgacggcctgaagctgcccatcgtggccgccgccttctccggctgccacctggaatttgtggaaaagcgcgcctatgatctgaacctgaattacttccacaaggacggcaagctctatgtggactgccgccgtacactgggtctgttcctcgtgttcatgccctaactacctcatgtgcccatatggggaaggagtctaaaatgtctattcccgatctcgaaacctatttacccaaggtcatttcttggcgcagggatctccatatgcacccagagctaggactccaagaaatccgtacctctaacttgattgcagatctcctaacaaagttcggccttgatgtgcagcgtaattttgccggtacagcggttttgggaacactgcataccaataaacctggcaaaacagttgtcctgcgcgcagatatggacgcacttccaatccaagatgccaaagatgtaccctaccgctcacaaatttctggtgtctgtcatgcctgcggccatgatgcccatactgcaaatcttcttggtgttgcgaactatatttccgatcatcgtactgaattctgtggaacaataaagttcttgtttcagcctgcggaagaactgttagaaggggcaaagcttgtctgtcaatcaggtgtgctggatggcacggattacattctgggtcagcatgcagtactggatgtagatgtcggtcaagttcaggtatgctacggcccttcaaacggtggtggtgatgaatttactttacggctccatggtgtaggttgccatggtgcacgtccgcacaccggtaaagatcctattttactcgctgcaaaagttatcgagggatttcaacaaattattagccgtgagctggatccattaaaggccgctgtcatttctgtttgttcggttcaggccggacagcatgaatcaaaaaatgtcgttccgcaggaggctgtgttagctggaaccgtgcgcacgctggaagaggatgtacgcacctatgttttgactcggatggaggaaatcgtagctggcctgtgttctgcaagtcgttgttcctataccttggagcatgttacaaaagtgcctcccttgaccagcgaccagcagttgacccaattagttgagaacaccgcagtggaattggttggacgtgaaaacgtcctataccgccctgctcccacaatgggggttgaggacttttcctggtataccaggaattacaatgcgtgtatgttctactttggcgccagaaatgtcgaaaaaggaattattacgcgggggcataatccaaagtttgatattgatgaagaatgtttcagggttgctatgccaatgtttattctgctttcaaaacggctgatgctggactagttatcgcatttcctactaattgacagagagaggggaattgttttggagcttgagtatttgaaagtcgcaaataaccctattatgtggatttccgtccttccaggcgtattgttagtaatcgtgcaggcgattgtattatctcgaagagccattgtatccggaagaaaaatgggtattacagagcgtcagtttaaaagcgcgattcggagttccgctctggcctcaatcggtccatccctaatcattgtaactggaatgattgctttactcagctccatgggaggccctattgcctggatgcgattagcctatattggcgctgtcaactttgagctttctgccgctgatcgggccgcctctgctgtcggatgtaccttgggaacctctaacatgactatggaagcatttgcctgcgccgtatataccatggtaatctgctgccttggctggattcttgtttctgccctttttgcacacaaaatgggtgacttgcgtgaccgggtagctggcaacaacaaagcaaaaatgagtgtcatcagtgtcgctggcggtatgggcgcttatggctatcagtgctttaatcgcggcattgttctcgccggccccgatgcacaaacaatgacggttatttttggttttggtattatgtttgccttggcaatctatggtaaaaagaaaaacgtggcatgggttagaaaatttggaatgatgatcgccatgtttagcggcatgctgcttggatcctttttcttgtaaggttaatacttccatcgcttgaaaggggtatttctatgacagaaaataaaccaaacacttcctcgatttttcacacagacttcttgccctttgccatccgctgggggcgtggtttaagtctttttggaatcgttttagcctttggtccatgccttggattggccgttatgggtattttcccatctgttagcggtgtaatggctggtatcgccgctcagctccccgcagtagtcgctgcatatttctatgaaccaatctcctactttgccatactgggtattgcaggcacttatatgggctttctttcgggaaatgtaaataacatgagagctccctgtgcatccatcgctcagagcgctgctaacgtcgaagaaggtagtgacgaaggcggtatcatagccactgttggtattgctgtctccatttttatcaatattgccttcctgacagtcggtgttattgtaggcaactatgttgttagtctgttgcctcagcatgttttggatgcgttaaatctattgctcccggctctgtttggcgcactctttgcaaatcaaattgtaaaaaagccaaagttagcgcttgtcgccctcccgattacgggtatcatggtcctaatgaataagcttcagctcctttccttcctccctggcaagctggttactcccatcgttatgcttacctgcgtcttcggtacaatgggaatcggactatttctcgccagtaaaggtaaaatggattaattgttatataaaatacagaaagcgaggatcaatcacacatgaagtccgccttaaaaaaggtgtcgctgatcctggccatctgctttgtagcatttcacctctacaccgcagcgttcggcactatgccgggcattgcgcagaagtcgatccacctgggcttcctgctggtgatcttctacatcaatgcaatggtcgacagcgagaagcgttgggagcaaatttttctcggtattatggcactcttcgccctgggcggctgtgcctacatcaccatcctggatgaaaacctgcaactgcgcgccggaattgtgtacgccagcgacattctgtttgccattcttctgattatcgctatctttgaggcgtgccgccggaagatgggcaatcccctggtcatcatcaccctggtctttgtggcctacgccttcctgggcaagtatattcccggcttcctcaaccagcccggcatgacgctgaagaagttcacctctttggtctatctgaccacagacggtatcttcggctcccccctctatgcctcggcctcctatgtggtcctgttcgtcctgctgggcgctatcatgagcgtctccggcatcggcgactatatgaccaatctggccacctccctgttcggccacatgcgcggcggccccgccaaggtggctgtggtggcctccggcttctttggctccatcagcggcagtcccacggccaatgtcatcggcaccggcactttcaccattcctatgatgaaaaagaacggctttgagcccgagtttgccgcggcggttgaggccaccgcctccaccggcggagccatcatgccccccatcatgggctccaccgcctttattatggcggaaatgctgggcattccctataccgccgtggcaaaggccgccctgatccctgctattctctactttctggccgtcctctttggcgtcgatatctatgccgccaagcatgggttgaaggggatcccccgctcccaactgcccaaggtacgtagcatgctcaagcagatttacatgcttgcccccctgatcttcctgatcttctgcatggccgtgttcaatatgaccatcgtgcgctctggcctgctgaccatcatcgtcactctcgtcctggtggaaatcaaccccaagacccgtatgaccaaggagcagtggctccagattcctgtccagacggtaaagagcgccgtttccgtcggcattgcctgcgccatggccggtattatcagcggtgtgatcatgggcagcggcctgggctaccgcatctcctccatcctgaccagcgtggccggcaccagcatgctgctgctgctcgttctgacgatggttgtctccctgatcatgggcatgggcgtcccaaccacggcggcctatctggttctggcctccctggtagcccccacgatgattcagttgggcattcccccgctggccgcccacatgttcatcttctacttcggctgcatctcctccatcaccccccctgtggcgctggccgcctatgccggcgccggcctggccgggtgcgatccaaacaagacaggctacaaggcgttccgtctggccttctgttccttcctcatgccgtacttgtttgtctacaatccggtactgctgatggagggcggcgtgctggacatcctctggagcctggttaccgcgctcatcggcgcctatctgctggcctccggcttcgagggcttcttcttccgctggagcctgaagtggttcgagcgtccgctcatgatactgggcgctgtgatgctgattgtgcccggtatggtcaccgatttggtaggtatcgccatcatcgtggtggagtttgtcaccgagttcatgtttaagcgttcggagaagttcgtccccgttaccgtttcccagtctaccacgtgacattttcccccgggtgaatgccattggagagaaaaagaaaaggagatatcgttatgaaaaagctgtcaaaacttatgtgtctgttgctggcagtcggtatgctgatgggaatcgcctcctgtagcagtgatgctggagaggggggcggaggctcctccggcggtacggaaaccgtgcgcatcagctgcgggcccctgaacggctatcagaacgtcctgtataattccattgccgacatgatgaacaaagccaaccccggcaagtacagctttgccattgaggcctccaccggctccgccgagaatgcccgcctgctggctatggacgaaaccgacttcggcaccatgggcatggatatgaccctgtcctgctacaatgccgagggcgagtttgagggcctgcccgcagaacagatcatgcacgtggccacccactccggcaccggcgcgacggtccacgttatcacttctgcgaagtccgatattaacagcattcccgacctggccggcaccaaattcggtgtcactgccggcatgatggccggttacctggacgatgttctgtgggcctacgatatgaccaccgatgatctgggcagcgtggtaaacctgtccctgtccgacctgtgcaccgccctccaggacggcaatattgacgccttcctgtacgccactcccgcccccggcaccaactttaccgacctggccatgtcctttggcatcaaggtcgtcgacatcggccaggaggccgttgacaagctgatggccgagaagccctggtaccacacagtggttatccccgccggcacctataacggctgtgataaggatatcaccacctttgcccagtacaccgctctctgcgcccgtgccgacgtgcccgaggagaccgtctacaacctggtcaagaccatgatggagaacgccgatgctctggaagccgtgcataagaacgccgccggcacctgtccggagcgcggcatcgaaggcgccctgatccccatgcaccccggtgccgagcgctattacaaagaggtcggcgtgctggactgatccccaattccctttcaaattccctccagattgaagcaagcggtaccgcccatccgggcggtaccgcttgcttttgtcaccgcaggaatcaatagatccccgtcagctcctgatagagattttttgcataggagtcagtcataccgctgatgaagtcggtcaccagcagcagccgcagatagaggcggtacccctcatcctttccctctgcgtcggcccggtagcaggccagttgattttcggagagcagcttgaccagctttttctccgccgccgtgggccggtattcctcgggggcgtcgtcgccggcatccaggtagagcaccgccgggacaaaccgggacagcagggtggtgagtatggtctgggccgccagctccagggtgagaattccctccgagtcgtaggcaaagcgacccatggccgccttcaaaatacggatggagccgccgtggaaggtgccctccatgatctcccgccggaacgtcccctccatgatggcggaataggagtccgtctgtccggcgccgtaggggacgaagccaaaggcggcggtatacatgagccagtggcgggcataggcgatccaccgctggaaggccgccatggagctgctctcccgctcgcgcaggcgggtcagctcgtcgatcatctcggcggattttttgacctggccgccgttgaggccccagtcgtcctttttcgcctccagggtgtcccggaagaaccgctcgaactcgtccagggtgaacaggcccttcttgtaggcgtcctccagatcggcagtggcataggcgatgtcgtccgccgcctccagaatataggtcaggggatggcggcagaagccctccaccgtccgggtaccggtggcggaggccagcgcgccgaaaagcgcctcctcggccttgtagtagcccagcttgtggagcttcacgtcggcgctggccttgtctacccgggtggaatccaccgggtacttgaccagggtgttaagcacggcaggcatgagatccataccgaaggcgctgtccacccggtacaccttggtcagcaggcgcagggcctgggcgttgccctcgaagtggcagagatcggccttcatctggcggtccagccactgggacaggggcctgcccttgtagctcagacggtccaggtggctcttgaaccagtcgccgatgaccacctcgccgaagtggccgaagggcggattgccgatgtcgtgaagcagtccggcgcacatgacggcgttggccgcgtcccgcgcctcgtcctccgtcatggcgtagggggtgccgctcttgtttttgcggatattggcggtaatcatggtggcaagctgcttggccagcgccgaggtctccatggagtgggtcagccgggtgcgcacaaagtcactcttgtccaggggaaacacctgggtcttgtcctgaagacggcggaagggcgcgctgttgacaatccgccagtagtccagctcaaagtcgttcatcgggtatttggacaggtcgtccgggatgtccagcggttccttccgccgggcatacaatagggtcttccattccattggttcccctccttttctttttctctatgtggcttcggcaaaatggaacaccattccacaacgttttctttattatagcataaaatccctctgaaaaaacagcggcggcgtgtttgaaaaccttcactttttcaaacacgccgttataattacataatataccacagctttccaggaataacaagcgcttttgctagaactatacgctttcctgttgttaattttagcttttttcgacaagtaattttacggactgaaaaagtgaaatttttcaaacatgaggcgcgatatccccaatatccataagagaggagtttcaaaaacatgaaaaggcgattgttatccacatttctggctctatgtattataatttctttttctccttcaactctggctgcaaatctaccggaggtagacgtgcggacggaggggcttaccccggcgcagccccaggaggcgcccgcagagaagccgagggatgccggcgcggagcggcggacgatttatgtctcgaacgaaggtacagaggaggacgacggcgcgaccgccgaaacgccgaccacgctggcccgtgcaaccgaattggcaaacgaagggaaaaaaccggtcgaaatcgtggtcttaggacaggtatcagtagatacctggactagccccactgtagagactactcttcgaggcggggacgagaacgcggagctgctgtttgagtattgttcggcctcggatgaagcgtacaacatcagtctggcagatgccctgaccatagatgacatcaaatttaactgcaactatacggattatttttttagcagatattatggtacctataccatcgttgccaacggttatccgttggtcatcgcctcgggcgtgcagtacagctattataccgcagacaccattgttgacggtaaaacatgtagcacatccagctgctatgtgattggcggaggtctggacgaggatatcaccggcggcactcatgtggagatttatacctccttgccgcttacctatgtatacggcggcggagtgaatggctccgtggagagcaatgtttatctgcacattgaaaactgcggtaagattcagcatgtgtgcgctggtggttacgcaaataaaaaagatgccaaagtcaacggaaatataacgttggactttatcaactcagtcaccgataatcctatctatggcggcggatatgcgcggtcgtcctattcagcggaggttactggttcagtttgcataaatctgtccggactaaataatggctttggcaggcccatttacggcggcgggtatgggaaaaacgctccagtagtaggaaatattacatttaacatttcgaatactaaaatgaacaataatgcggccgctatctatggcggcgggtacgacagcgacgtaacaggagacatctttatccatatcaaagagaacagccttatctcagaggaaaccgtctggggcggcggaaccggagattccaccataacaggtggtgttacaatcaccgtggatgacagcaccgaggtgatcggcgaaatccacgccggcggcaatgaaggcgcggatgtgatcggcaatgtctcaatcacagtatccggtggcccccaatccgcctgcccgaccatttttgcgaccggcaaaggggaggacgaggataacccggcccaagttgacggcaacgtctccattactctgcacggcagccgggccaacgtatacacactggacaagtttggcgaagtgacctccgaccatgcggttacgattatcctggacgacactgacgagctaagcggcgcggtgcggggtgattccaagctggaccagcacctttataactatgagaaaaacacccccacccgtacaggaaacggcgccagcgtcatcgtcaaaggcgattacacctctaccggaatccacgggttccctgaggttgtaattgaggacggcggcatcctgcgcgagcatctcgcctccggcgagacgctgtttgacggcgtggagactgtcaccattcaagagggcggcgcgctggatctgctgcaaagcaacgagatttccggaaacttcacttgtgcaggcacattgaaaatgcctgcgccgatcagcgcagaagcagatatctgctatttgactgcgggcggcaatgtcaccgtgcaggagggcgcggcctatgtccccactaaggataacggcgcggccgatgcggactacgtcaagggcgatgtgttcctcaagcagggaacagtatacacagagccgtctgcaaaggttgactttgccgtctccgaggccggtcaggccaaggaatacttcacggatgaccgagcggtaacagacgagtccgacatcacccacgagtggtttgtcgaccagacccagtatgtcaccatccgcccggcggacattacggtttacaccggcggcaacagctatgacggcgtcacggacgagagcggccagattgtcagcggcagcggcctgcctgaggcaggctatctgctcaccgtcccggaggagattaatgatatgctggaaggccctggacaggcggttgacctcgccggtcacctgacctttacctatggcgccggcgaaaccgcccgggcctgggatattcagctttacagcgacggcgctaccagcaccaccgacccggtggacggaatcgcccgttatatctaccggatggaatcggtaaaggaaggccaggatcccgttcggctccagtttacggatccagagaccggggaagtcaagatcagcgacgaattcgacgtctctgccatcgagcagaacaggacctactccatgaccatctactccgacggggtggatcagggcctcgtacaggcggtgttcaaagatattcccgaacattccgacgagacatttatctatccggtcaagattgaagaaggcgccctcaccattcgcggtgcgacagaggagggcgtcactgccccggtggaggacaaggcagacgatgtgacgggggacgccatcaccgcggtggccccggcggacgttacgtactacgtcaacgacagccaggtggagatcaccgacaagaacgccgtccacctgctgaccgacgaagtgctggacgaccaggtgctcattgatcacatcagcaatgaaatcatcgggtctgataccggcatccccaacggcgactacctctacgagttccagtacatggatctggtggacagcagcaacggcaacgcctatgtgaccctgggcgacggccagacgatagatctctactggccggtgcccgacgacgccgacacctctgcgcccttctacatcgtccactttgacgcgctcgaccgcgactacgagggcgcggcggacgaacaactgaaggagaatcctgcggagaagctggacggcacactggtaaccctgaacggcaaacagtatatcaagtttgccaccggcagcttctcccccttcgcgctggtctatcagaaggagtccggcggcggggaccacggcggcggtggtggcaccacctactacaccctgcgctatgagagcaatggcggcaccaaatacaaggacgagcggtaccgccgcaatactctggtgaagctggacaaggagcccgtccgggagggctacaccttcaccggctggtacgccgacaaggccctgaccgagcccatcgacgacatccgcatgacctccaacaagaccgtgtacgccggctgggaaaggaccggcgtgcccgaccggctcaatggagacgaccatttcgcctacatcatcggccgggacgacggcctggttcaccctgaggcccccattacccgcgctgaggtggccaccatcttcttccgtctgctcactgacgaggcccgggacgagtacctgaccgggaccagcccctttgccgacgtggcctccgacgcgtggtacgccaccgctgtggccaccatgcaggccatgggcatcgtggagggccgcagcccctccgcctttgatcccgaggcgcccatcacccggggcgagtttgctgccatcgccgcccgctttgacagcgatccctaccacggcgacgaccgcttcaccgacatctccggccactgggccgccgggtacatcaaccaggccgcggtgaagggctgggtggagggccagcctgacggttccttcgcccccgaccgcagcatcacccgcgccgaggccatgaccaccatcaaccgcgtcctgggccgcctccccgagaccgcggatgatctgctggacgacatgatcgcctggcccgacaacccgccggatgcctggtactatctggcggtccaggaggccaccaacagccacgactacgagcgcaaggccgacactgtccacgaaacctggaccggcctccagcctgcgggaaactgggctcagtaccaataaccttcacaaaaagaacggccccggaacccgtcggttccggggccgctcagcctgtcgaaaaagtcttttcgacaggctgagggactttttgaaaccttttgaagtttcaaaaagtcggttgaccaaacgcgaaagacaaccctgacggttttctttcacactatctttccctccgaaaccttcacccggaaggtttaccgatagcctcagcggccccggaacccgtcggttccggggccgctctctgtttccacatacggacggaccgtcacaggcggtagatgcggtgaaactcctcctccagccaatcccgaaagtccgggtgggcgatggagataagggccttggcccgctgcggaaccgtcagcccccgcaaacagaccgcgccatactcggtggccacaaagtgggtattgctccgggtaagggtcaccacggccccctccggcagtaccggcagtatacgggactggagacgccgctcccccgtgtccgggtcctttgcagagtaggtggagcgcagggtaataaccgacttgcccccgggcgccatctgtgcgcctacggcggtgtccacctgtccgccgctgcccgagatctgccggggccccacactctccgaggcgcactggccggtgagatccacctggagcgcagcattgatggaggtcatgccccggttggccgccaaaacagacagatcgttggtgtagctcagggccttgtggaggatggtggggttgtcatccacgaaatcatagagggcatgactgcccatggtaaagcacgtcaccgtcttgccccggtggaggctcttgcggctgttgtccgccgcgccgcaccggagcagctccatggccgcgtcggacatggcctcggtgtgaatacccaggccccgcttgtccttgagctcggcggccaaggcgttgatggtacccccaaagccgagctggatggtggccccgtcctccaccagctccgccaccacccggccaagctggcggtccacctcatcggggggctggggtgaaagggcggcggggtagcggtcggactccacaatggcgtccacctgggagacatggagggtcacgtccccgaagatccggggagcacaggaggccacctccaccaccacccgccgggcgcgggggagcacctccagctcaatgcaggccgagcccgccagggaaaagcagccatgcttgtccataggggagaccgtgagtaccaggcagtcgtactccggcgccccatgggtccagtccctggccgcattgcgcaggtggttgggcaaaaaggcgcagcggcccaggcgctgggcctcctgctggtaggtgttgtaaaaaatcgactctatttgaaaggcgtccccgcaggcggggtcggtaagcagagccaggggctccaggggcaggtagttgagcacccgtaccccgtggagctccgccgcccgccggtggagggcggcggcaaagtccactgggagcagcgggccgcccgccagatagacggtgtccccggagcagatgcggcctgcctccgcctccgcagtggtacgccggcgggcatattccgcctcaaacatgggaaagcactccttttcttgcacagagggcggggcagccaggctgccccgccctctgaagattgattcagacaggagaattacgcgtacttctgaagcgcagcggcgcccttctcggtgatgcgcagcttgcgcttgaacaggccgccctccaccacgtagccgcggcgggtcaggtgagagcagattgcggacatgcgcatggacttaatgccgtttttctgcacaaactccgcctgctgctcggggttctccttgaccaccttcaggagctggacatacagggggttcaggaactcctctgccatctcggcctccttcccgctgagggcgggcagggccgccagccccttctcggtgatggtaaaggtgtagaacttggagccgctcatgccggcacggaccaggtagccgccctgatccaggttctccacggcggcaccggaggtcttggagtccacccccagggcgtcggtcaggtcggacatgtagcagtggccgatgcgcagcatctccagaatctgcttttccaactcgcccagcttgacctccttacggttggaggcggtgggcacccgctcccagccggggcggccgtaatacttgggctggccgaatagggaggcgatcaccgccaccaccagggtgaccaccaggcccagggtggccagatacacatagctgttgatggagaacaccttggtcaggtccagcagggtgaacacagccatggtggccatgccgcacaccgcgccccacagggcgccgcggccgttaaagcggggccagatggcgcccaggcccagcaaaatggcggggggcaccagccagcagttggcaaaggcgaacaggtaggtggggccgccggggaactggcagagcacgaaggtgaccacgccgatgagcagcatgatgatcttggacatcttcaggctcttctttgcgtcagccttggggttgatcaggcgctggtagatatcacggttggccacagcggaggcgcccagggcggaggtggaggcggtagagatggatgccgccacggcgctgataaccaccagggagccaaacagagacacgaaggtcttggccacatagccgtaggtgccggtaggagccacggtaccgccgttgagggtgagctgctcgggatagaacgcgcccatgtagccgccgatgaagcacaggggcaccatgaacaccacaatcaggatgatggcagcggccacgaaggagcggcgggccaccttctcactgcggcagttggcgaccttcatccagtagtagttgttgccccaaaccagggctacggcgaagcagataatgaagttaaacaccgaggggtaggtcagcttcatgccgggcagcgcccccacaaagccctggctcatgaagtcgccggcaccccagttggcgctgatggcgtccagccagccgaagcgtccggccaggatgaagaaggtggcgggcaccacaatcacgccgatgagcacctggaacaggtcggtgatggtggtggcccacaggccggagacaaaggtaaacacgatgatgacagcgaagataatggcggtaatggccaggcggttccagccggtgaaggccgcaatgttgtccacactggacaccacgttattggccataatgccgcacatgccgataacagaggtgatggccactacggaacgggtgtgcccgtcgtagcgcatctccagaaactcgggcagggtctgggcgccgctgcggcggacaaagttggagtacagcaggccgaaaatcagcaggccgcacaccgagtagatgacaccccaacccaggccgcccagcaggccgtactgaatcgtgaagccgggggccagtgtgaccgtggtgccggcaaagccgatagcaatgacgcccaccacgttgatgggggtggaaatctcacggccggccagcacgaagtcggaggactccttgacccaccgcttgctgatcaggcctgcgcccaatagaaacgcgcagaaaatgacaaatatgacgacaaatatgacgttacccacgtttgtccctctctttcatatgtatggttgtttacactgacacaacaaaagggttactccacgaaggccaccacacgggcccagccggcggaggcggccttgatgcttaccgggaagcagcttaccttgaagccggtgacagggagctgatccaggttggtcagcttttcgatgtggcagtaggccttgtcgcggcccacccggtgggcctcccagataatggaggcatcgtggttcttttcaaactcctccccctcgaagggcaggggcacatcccagctccagccgtcggtgcccaccacacgcacgccgcgctccagcagccacatggtggcctcatagctcatgcccgcgcccgcaaccaggtactcaggcttgccccagcggtcatcggcatcggtgcgcaggaagacaatatcgccgggcttgagggtgtagttgatcttctggaagtactcctccacatccttggcggtgatcttgtatccatcgggcttgtcgtggaaatccatcaccacgccgtcgcccacaaaccagtccagaggcacctcgtcaatggtccaggcccgctcaccgccgttcatggtggggtaatagtggtagggggcatccacatgggttccggagtgggtgcacacctgcaggaactcgattccccagccgttgccctccggcagatcctcaacggtgcagcccttaaagaagccagccatctgctccgcggtgtccttgtggttgcaatactgaatcttgggaatctggatcgggggatcactgggcagtccgtcttcaatgggaatagacaggtcaatgattttcatagtggttacactccttttgattcggccggtggccgttgcttgcgtctcataagacagcaatttctgtgccaagtctgtctaacactctgcaagccgttgcaactgtaagaaaaagcggttattttcattgacatccaggcgcccaaacactgttcggtaatccgtacatttgaatattttattttgagctgtcttttggcaatccccctctgttcttatgttttaagcctcatgtattgatttccttacatgttttgttttccgtacatttcgcaaacaattttggacgttttctggcgttttttgtgactcaattttttgcaaaaacccattttctccgcatcaactaaacaaaaagattcattttcggtgaaattaaccattgtaaaacagcgcgcagcttgctatcgttaatacattccgtaccgtgtatgagtggaggaagccgcattggaaaaccacattgatccaagcaccatgctggaatttatcgagggtctggccgccatggcggttctggaccaggacggcgtctacacctatgtcagcccgggctgggagcgctacaccggccacaccgcacaggaggccatcggccggaaggtttgggaaatggtgcccgacacccacgccaccgaggtcttccacacgggcaagccggtctttgccaaggccgtcaacgccaacggccccgcctttacctcctattttccccgctttgaccgggatgggaagctgtgcgggctgtttctctatgtcatcgtccagggtatggaggacgctcagaacctgacccggcgcatcggcgagctgtccagcaaggtggagttctaccagcaggagctgtcccgggagcggggcgcacgctacggactggacaacatcatcggcgaaagcgcctcggtcctccgcctgaaggagcagatcgtccaggccgcccgctccacctccacggtgctcattgagggggagacgggcagcggcaaggagctcatcgcccactctatccacgccatgagcgcccgcaaggcggccaactttgtgcgggtcaactgctccgcgattccggccgagctgatggagtccgagttcttcggctacgccgccggcgccttcaccggcgcggcccggaagggccgcatcggccgctttcagctcgccagcggcggctccatttttctcgacgaggtcaacctgctcaccgccaccatgcagcccaagtttctccgggtacttcaggagatggagatcgacccggtgggcggggagaagagcattcccatcgacgtgcgggtgatcgccgcctccaatatcccgctggagacgctggtggaggcgggacaattccgcagcgacctctattaccgcctcaacgtcatccgcatccaggcccccaccctgcgggagcggaaggaggatctgcccctgcttgtggacaactttatccaccggctcaactaccagctcggcatggtcatcgagggggtggcccccggcgccatggacctgctgatggattacgactggccgggcaacgtccgcgagctgcagaacgcggtggagagcgccatgaacgcggctgactcccccatcctgcggcggcgggacttccgccaactggagcagcggatgcaggcccggcggcggcgccagctcaccgggccgggggacttcaagctgcgccccgcccgccaggcctttgagcgggagcttattcgggacgccctggccgccgccgggggaaaccgggtcaaggccgccgcgcttctggacatctcccgcacagtgctctacgaaaaaatggaacaataccaattaaaatagacagactgaggagaggaacattaccatgcagacacaactgagacaggccgtggttgtcgccttcggccgcaccccctactgcaaggcccgcaagggctcctttgcccagctccaccccgtggagtatggcgcccagacccttctgggtgtgctggccagagtaccccagctccggccggaggacatcggcgacgtgatcatgggctgcgccatgcccttcggtgtccagggcggcaatatggcccggctgattgtccagcgggccgggctgcccgactgcgtcaccgcccagaccgtcaaccgctactgctcctccggcctgcagaccatcgccaccgccgccaacgccatccgctgcggggaggaggacgtggtcatcgccggcggcgtggagtccatgtctctggttcccatgctggtgggcgcggaggatgccgacccctggctggcggagcaccgccccgaggtatacaccaccatgggcatcacggcggaaaatgtggcccgccagtggggcatcagccgggccgatatggacgccatggccgttgagagccaccgccgggccgcccaggcccaggccggcggctgctttgacggacagatcatccccatcaccgtccccggccccgacggcggcgaggtggtggtctgccgggacgagggcatccgccccggcaccactgcggagacgctggccgggctgaagccctgcttcctggaaaacggctccgtcaccgcagccacctcctcccagatgaccgacggtgccggcttcgtggtgctcatgtcggaggaaaaagccgcagagctgggcgtgaagcccctggcccgctttgtctcctttgccaccggcggcgtgcctgcggaggtcatgggcgtcggccccatcgaggcggtgcccaaggcgctcagaaaggccggccttaccctggagcagatggacaccattgagctcaacgaggcctttgcctcccaggccctggcggtcatccgcaccctgggcatggacccggccagggtcaacccctggggcggcgccatggccctgggccaccccctgggcgccaccggcgccatgctcacctgtaaggccttaagctatctggagcgcaccggcggccgttacggcatggtcaccatgtgcatcggcggcggcatgggcgcggcaggtatcttcgagtgcctgtaacggcagtacagcaggaggccctgggaaccttccggttcccagggcctcctttcttgctgcatacgtcaaaaaattaacgcttgtcatttgggttcttaagtgctatcatcacagtatcatatctatactaatcggtttgaaaaggagaataagcatgaaagaactcgaaaacaaggtcgctctggtctcctcctccacccgcggcatcggcctggcctgcgccaagacgctggccgcccagggggccgcggtctatctcggggtccgccgcctggaggccggacagcagatcgccgacgagctgattgccgccggcgggcgggccggggtggtcttctttgacgcctcccgggaggagagcttttccggcatggtggacgaggtggcggccaaggagggccggctggacattctggtgaacaacttcggctccaccgacgtcaagaccgacctggacgtggtgaacggcccctcagaggacttcttccgcatcgtcaacaccaacctcaagagcgtgtatctgcccagcaaggcggcggtgcccctcatggccaaaaacggcggcggctccatcatcaacatcggctccgtgggcggcctctaccccgatctgagccgcacggcctacggcgtcagcaaggcggccatccacttcctcaccaaggacatcgccgtgcagtatgcccggcagggggtgcggtgcaacgcggtgctccccggcttcaccgccaccgacgccgcgctgaacaacatgtcccaggccttcctggagctcttcctgaaaaacgtccccctcaaccgccccggccgcccggaggacatcgccgacgccgtcgccttcctggccagcgaccgggccgcctttatcaccggcgaaatcctgcccgtggccggcggcttcggcctgcccaccccgctgtacggctcctatatgagcgcgggggccaagggctgatttcccctccagagggcccttcggggccctttttgctatgcgttgcatagcaaaaagggccgtgcgccgctgaaagcggcgcggccatgaacgcaacagcccatgggccgggacggcccacaggcgcaaaagctgcatgcgcaccggcgtttgcctgggcgcgtggcgcgctttaagcccatgaagcttgttgccccgtccgccccggacgtgctatactatagtatcacaccgtaaaggacggcagctatggacaaactggttgtaggcattctggcccatgtggacgcggggaaaaccactctcagcgaggggctgctctatacctgcgggcgcctgaaaaagctggggcgggtggatcaccaggacgcctttctggacaccgaccccatggagcgcgcccggggcattaccatcttctccaagcaggcggtgctccccgtggacggggcggagcttaccctgctggacacgccgggacacgcggatttctccagcgagatggagcgcaccctccaggtgctggactgcgccatcctggtcatcagcggcaccgacggcgtgcagggccacacccacaccctctggcggctgctggagcgctacggcgtgcccaccttcctgtttgtcaacaagatggatctggcgggggcggacaaggccgccctgctggcggggctgaaagccgggctggacgaggggtgcgtggacttcaccgccccagcggcggagcgggacgaggcggccgccctctgcggcgaggacgcgctggagcgctatctggaggacggggcgctggacggcgataccctcaccgcccttatcgcccggcggaggctcttcccctgctggttcggctccgccctgaagctggagggggtggccgaattcctccaggggctggtggcgtacgccccccggccccggtatggccccgattttgccgcccgggtgttcaaaatttcccgggacaaccaggggaaccgcctgacgtggatgaagctcaccggcggcgccctgcgggtgaaggaggccctctccggccccggctggacggagaaggccgaccagctacgcgtctactcgggggccaggttccagaccgtggacgaggctcaggcgggaagcgtggtggccgtcaccggcctgagccgcaccgccgccggcgagggccttggggcagaggcggaggccttgccccccgccctggagccggtgctcacctaccaggtgctcctccccgaggggcaggatccccacgccgccctgggcaagctccgcctgctggaggaggaggatccccagctccacctggtgtggaacgagcggctgcgggagatccacatccagctcatgggggaggttcagctggagattctccaggcgctggcggcccagcgcttcggcctggcgatcaccttcggccccggcggcatcgtctaccgggagaccatcgccgccccggtggagggcgtgggccactacgagcccctgcgccactatgccgaggttcacctgctgctggagccgctcccccgggggagcggcctggagctggccgccgcctgcccccaggacatgctggacgggaactggcagcggctggtgctcacccatctggcggagaagccccacctgggggtgctcaccggctcccccatcaccgatgtgcgcatcaccctggtggcggggcgggcccaccttaagcacaccgagggaggcgacttccggcaggccacctaccgggcggtgcgccagggcctcatggaggcggagagcatcctgctggagccgtggtacgacttccggctggagctgcccccggagcaggtgggccgggccctgtccgacctccagcgcatgggcgggcaggccggcacgccggagaccgccggggcgctgagcgtgctcaccggctccgccccggtggcgggcctgcgggactacggccgggaggtggccgcctacacccgtggccggggacggctgagctgcaccgccggcggctacgccccctgccacaacgccgatgaggtgatcgccgccctgggctacgacccggagcgggacgtggacaacccggcggactcggtgttctgcgcccacggggcgggctacaacgtgaagtggagcgaggtcaaggcccacgcccacgtgggcagcggcctgcgcctgggggcggagccgcccccgccggaggaggccgcccccgtccggccccgcagcgtgtcctacgccgcctccctggagcaggacaaggagctccaggccatcttcgagcgcacctacggcaaggtagagcggggcgccttccgcccccagcccaagcccgcccgcaccagcctggacgaccggaagtactccatccaggcccagaagcaggggccggaatacctgctggcggacggctacaacctcatcttcgcctgggaggagctgaaggcggtggcccgggacaacctggacgccgcccggcagatgctcatggaggtgctcagcaactaccagggcttcaagcagaatatcgtcattctggtgttcgacgcctacagggtgccccgcagcgtccaggacgtgacgaagtaccacaacatctacgtggtctacaccaaggaggccgagacggcggacacctacattgagcgggccacctacgagattgggaggcaccaccgggtgcgggtggccacctccgacggggccgagcagctcatcatcctgggccacggcgccctgcggctgtcggcctccgccttcaaggccgaggtggagcaggccaccggccagatctccgccattctggcggccaacaaccgttccgccccctcccagccggtggccgccgccctggagagggcccggcgcagacaggaggacaagccatgatccccatggaaatcatcgccaccatccgcagcgactttcccaccaagttcggcataccccgccagagcggcctggtggaggagctgcgggccaccgtggtcttcgagccggaataccgcagccccgacgcgctgcgggggctggaggacttctcccacctctggctcatctggcagttctccgaggccgtgcgggacaagtggtctcccacggtgcggcccccccggctggggggcaacgcccgcatgggggtgttcgccacccgctcgcccttccggcccaaccccatcggcctgtcctgcgtgcggctggagggcatccggagagagccggagctgggctgcgtgctggaggtctccggggccgatctgatggacggcacccccattctggacatcaagccctacatcccctatgccgactgccgcccggaggccagcggcggctttaccggcaacagcggcggggccaccctggcggtggattttcccgccgccctgctggagcgggtgcccgcggacaagcgggccgccctcaccggcgtgctctcccgcgacccccgccccccctaccagcacgatccggagcgggtatacgggctggacttcgccggggtcaacatccgcttcaccgtagacggggacaccctcaccgtccgggcggtggagcgcatggcggacaaataggacaaaatagataaaacgccgggcggccaaggccgcccggcgcttttacgtctatgccgtctgctccagcaggagcgggtagagctccgcctctcccgtcccctggaaccagaaattccaatagtcatccatgtagtagtagaccagattcccagggcagaaggtcatgcggtagtatccggaggcgtcggtgacggtaacgccctccggctcctccgccggggcgggcaggggcctctccccctccgggccgtccgcctcagtcagcccccggaacgacacagacgggcagcgcagtacttacttagtcacccagtggatagccgcaccctatatacagggggcggcccaaacctttgttaatccccggggcccaaggcctggcatccgctcagatattgggcatctttgcagtgggcatcatcagcacctttccggtaccacggtatacgttcacaaggccctcaccagaggcggccgagccgattaggctcttaccggagcgctccacggtgaagtccaggctcttactccaggcaattgcatagttgccgtccaccttcagtacatcgttctggagggtgatctcgatcaattcctccttgggacagtcggactcgatacagaatatgccgctgccgttgaggctcaggttaaacagcccctcgccgccagccaccgcggaggaaaggttggagcgcatgaccgccttgtgctgcaggctggactcacaggccagaaacaggccgtcgtccagcacgacgctcccaccccagtcggcagcgtccatcaaaataaggtgcttataggttggctccagcaccagcagtccgtcgccggtgtactccggcttaattgcagactcaccactggccttgccgcgcaccgccttccccaggaagtcccctacgcccttaatgccggtggtggcgttcacgttgcccagcatccactgcatggcacccgcctgaatggtcacatgggacttgtgcagatggcataccagttggcgctttttgacgttcatctgtgcgctgaagtaggccgttactgcagaggacggcgaaacgctcaaatcccgctggtattcaatgatctgaaaggcacccagctcagagagcacttttacgtcatcattctcggtaaaattggaaacctggtacataggttttcctccattcaattcatatgggtaggtctttttatccatagaaaaatatatgtttgtatataaagattttgtaatttccagccctaaccttatgtaacccggcaaatggcggcaataccttgatttctaggcgtttccgctatttgccgtttgggagagtgtttcgcatatctcggcgtatcttggagtgactttgcactgaaacgtagtacggaagtagtaaacctggcctttcgcttcctttttactacgcggccagccgctccatctccgcccttacggaacaggcatcaacatgggtgtaatagtccagcgtcatggtgatgttggcatggcccatgatgtactgtaaagccttggggttcataccggcgtttgccatacgggtacagaacgtgtgccggaaggagtgtggggtgatattgggcaatggctccttgtgctgcttgttatacttcttcaaaaggttccttatcatattgttatagtccatgcccactttcggcgttccatcccttttgaggaacagaaagtttgtgtacccgtctatcataatggtggttttctttccacggttcttcaccactcgcttcaacgcttgatagactggctcactcatgggaatttcccggtagccgctcttggtcttaggtgtttcgatgtagtagccgctcttagggtcccgcaaaagctggtgatccacccggatcaggcgattcttaaagtcaaggttcgtggtcagcccacagaactcagaaatgcgaagcccggttcccagcaggatgataagctcatcaacgtacttccgatatactttgtcattttgcacaaagtcgatcagactcacctcctgttccggtgtcagcacggttttttcacctctgttgtcctctaagactttgtttagggcaaagctgaaggggttcttgcgaacacaatcgtcctcgatggcgataaagaaagcggcccggagggaacgcttgtagttgctgatagactggaaactaaaccccttttccttcatgcggatagcccactctttggcatcggatggcttcaccgcatcgatgcttttcctgccgagagggtcatcccgcaagagtcccatcaggtactcccgctgtttcttggtggcccgcttcacatccgcccgctgactgttctgcttggcgtagagctggcagacagtcatttttttgcccacagcgtcgatgccgtccgcaatatcccggttgatctccgtttccttctcacgcagagaaatatcatcccgtttgcctgtcggggtcttgtccgttgctaccagcttccaagcatagacgaactggggcttgccggtgctgtccgtgtacttatatgcgtatctcccgtcttttcgctgactctctccagttctcaaaatgcggcctttgttatcacgtcgtttttccgccattggtaaaactcctttccaaaactggaacgagccttgatacgacttgaatatagtgtatcatatttctggctcaatacaaatctgcgattagatcacatccagggagtcaatgactttttcaaactgcctgcgtttaatctggacgcggttgccattcattatcagccagttggcgtctgagttttcttccaccagttttcgcaacttcttttccccaatacggaaatacttggctgcctcctcaatggtcagcgtgtacttctcccaaataggcacatcggaatagctcatacgcccgcccctcctttcggtgtgaccacatactctatgccaggatactgaccgcagtagacgcaaaccttctcttcagcctgtccctgcgcggcctcccgcaaaacaaaagcgcctgtgccgcgaaaagcgtcagcacaagcgtcgcataagcagagagttagtttcggggggacgggttcgatcaggccgatactgattgccaaagcgtggttgatgccccggatatgttcctcgtccagtctgccgatgtagccagacaaccgccgcttgtccacagtacgaatttgctccaacaaaacgagggacggctgtaccagtccattcccggcgtccaggtagtagtgggtgggcaacttggctttgacgttggccttactggtgacggcggcgatgataaccgtgggactatgtttgttgcccacgttgttctgaatgataacaacgggccgggtgcccttctgttccgagccgattccgtggccaaggtcggcgtaatatagatcaccgcgtaaatatgtcttgctcatggtatttgacctccctataaaaattagacggcctgcgtcgcctatgtaggggccggacagcgtaacatattaaggttggcggggcataaacgctcccgttttcataagcctatcccgctgtccggcttatatcaaagcaagcctatttgtccgcgacaccccggcccgctgagggaagtcatcaaacggctggcggcgaccagctccacgggaatttcacccccggcaggttctctgtcggctgctctcattgcctgcgacggctttgcgttggaaaacgctatcacgctcggactgtgactgaacaggagtatcattgtccctattgccggtcttggccgtaccgggagccacccggcatttcataaccgctgattctcgctccatgctggacggcaaaccgtggacgaaatgatagtgtggcatcccgttgttctgtccggcatatcctggcgcaacgataagaatggcttgcggcaataggaatgtgtttgatgaatgggtatgaaattgtcaaggtcaaacccattcatcgcataaacgaggaacaggtgaagagctttccattgctcttcacctgtttcctcactcaaacgctaaattgtaacctccccggacagaaaatttttgagtttcttcaatgcagaagaaattgacttcatcacagcggggtgcttacacccctccatatctgcaatttgttcgtatgtaaactccccaaaatagtacagcaccagacggcgacgctgtttttcaggcagttgggcgattgctcggtgtagcttgtccatctccatctgctgagaaacgatttcttccacgctttcctgtggttttgcggcccgtctgctcagagtggcctctgtcatttcggatcgctcatagtgcctgtccacttcgttgaaaaaagaaagatcgtccagttcaaactcgttgaacgcatcgaatagggtcttgtcgatctccatccagcgttttaccttgttgctgtccgtaaatgccaaaaagtagcgtgggtgggtagtattgataccagtggtgtatatttcataagggttttcttcatccctccggcgcttgggacgagggtcaatgttttttggatgactgccatccattgttttttcctccattcgttctgaatttttgaaaattcagaacgtggaggactacgacaatggggtggcgagttgccgcagcagaaaaaaatagcatcaagggagtaatatcccctgacactgatttgaaaaaaaaccgcagaattgcccccaaacgagagctttcctgcggattgagactgttggaaagaggtaaaaaaaataggggaacgttgataaacgtaatttccccacagaataccacgcttgttacagaatacacgggaattttgtaaaattccgtataattcgacgcacgaaagccccgcaaagatcaggatgacctttgcggggcttatacttcgacaagatatatacttattcccggctattttaaacttctcatattcatccccgtctctttacaacgaaacgagcattagaggtgttatccggtatttttcaatatgacgtttgactgattgcctccacctctatctcccaattatgttactctacattcaaaattgcgactttggcaagagccgactaggacgtattagaaaagcaaacggacagccatttggagtgtctatcaatgcttcttgctcacaaaaactacttcacttcttgatccagtccttgaaacaactccgaactgaaaaattcttctattgagattccaaggccatcacataacttttttatcgttgtaactgtggcgctgtgattgcgcccactgacaatgttattcaccgtggactgcgtgacaccgctcaaaaggcacaacttattgatagataaattgcgctcacggcataaatctaagattcttgccctaactgcctctccaatgtccacgggtatcacctcaatcctatattgaagatacccgattgaacttgaaatgattacctcttttgagttaaaataactcaaaagaggtataccgcctattggggaacagctttgcagccacagcaccggcctaacattaccggcttcttgccatgacctccaatagcttatctaaaatttcttttgtagcccagaaatcagcgtcaggcaaatgggagaggcgatccgtaagaaattggagggcggcgctccgctccgcctcactattactgctctcaataccaaacaaaattgcatcagcaggcacggacagcaaaacacagagttgtttcagcgtagccagcgacacaccaacagcgccgcactcaatggccgaaaggtgctttacaccaaggccaatcagttccgcaaggcgttcttgcgtcagcccagcattttcccgtatttgttttacattttggccgatttcaagattgattggttttttctctttcatagtaacaccacctttttttgttagtctaactaatggtggcattgactataaccatctacttttattataatatataacaaatatgatagtgagtcttggaatgtgagcaggggaaacgccgatatgaaaatctggttcttcatcggccattataataattttgacaccatgacaaccgaagtgtagtcataaaagcaaaaacgccacctagcggtgacgttaattccccattctactatctgacaccacggggcctttcacagcacttgttggagacggcgcggaaacgctcggcccgtggcctaatatgcgtgacaccccatctgggggctataagttgaaatcaacgaccctaaaaacaatgtgtcggcattacactatcttagcacacttattggggaagatcatagtttgaaaatctgatctcaatcaaacttcaaaagttgatacggggcaacatctaaagcatttgcaatacggtaaatagcaaccattgacatgggataaggtgttgaagattcaatgtggctaattgtagaataacttaaacctgatttttccgcaagctcttcttggctcaatcctgattttttacggaagaactggatgcgaaaaccaatattctttaagaaatttgcctcattacctatatatcgtaaatttgggttcatattgttacacatccgttcaaaatagaggataattgtattttacttgtattatcctcgcttttgaacgttgtattctgggcttttaacgcagtattttcgcaatcaatcgaacttcaaaagttgatatggatgcacatcaagcgcaccggcaattcggaagatggttcgtagtgacatagtataacacgttgtcgattcaatatggctaatggtagagtaacttaaatcactcttttcagctaactgctcctgacttaaatttgcttttttcctaaaatattggatacgaaagcctatgttcttcaaaaattgggcttcgcccattaaatattcggaacgactacccaatcatcttcactccattcatgtgtagtgtggttatgatactaaattttccatcgcacatgaacgttgcattatagtattatattgtagtattttcgcaagtatgataatatatttatgcggtttctggcaaaacaccagatgcttgaaggattatttgggcaactacatggacgcatagctcacccttacgcggaaggagtatgagagatgtctgcttatgattttaccgatactctcgcagtacaaattctcacctacaaaaaagaacataacgaaaacgctgcgcagtttgctaaaggatgtggcgtcagcgccgccacaatccgtagaatagaaaacggggatgtcaatgtgaaactgagtaccgctgataagctcctccgctacatgaacataactctcattgatttattgccccccttggttacagaaagtcctattgcagagggaaaagagcgaccgagaaataaaaaggccactccagccccgcagggagaagtggccgaaaagaagattttattttccgagcttttagcgaatattccatcagatgaagtgctgacagagctgttacctgatccttaccgcccccaaagggcgctgaccacgcattccgggctggaggtcttaaaactgcgcctggaagggctggacacggctcaaaccgcggagcggctacacatgacactcagccaagccgatcatcggctacggaaaactgtgcgtcagcttactcggtacataccggaaaacatagtgattgatattcccgccctgcggaagatactgggaatacaaccgtttcatttcacggggcgctatacaaaactgtcggagctgttgcgggatatgccatccgatgaagtgctgtttcagcttgaccgcgagcgcgggaatttgaccggaggcagaaaaaggcatcgtgtcagcaatcaggacttgtatctcctgcaacagcggctggccggccacacctatcggagtattggagaggaacttggtatgtctcccaaagcagtccgtcaccggatattgcggatcaaagttggattaagatggtatttagctgttgatctggatgtacccgccctatttaactaagggaagaaattggacgccttttcgccttgtgaaaagcttatctaccatagtctttccataccttagaaacacctcaaaatgaacgccggaggcaacattatggttatagataggacaacagggaagggttgcgctttaagcatagcggctaagacggtcactcgaaatctaattgccgatggcattattggcaaaacaattgctaaaaaggagcgccctaaacgctctgtttggctccgggtgcgagactacggagatgattgggtatgtattggcgggaatatcgctcatgaactaacagaggagccgttatgggtcccatctttcattgacgaggggatatggacacaggcggtcagcaaattccatattgatagcaggttggacgaaaatgtagtggagtttttgttaccagaaatggatgaatacctgcaaaatattcctgattcagaactgatttctataacaagagatttcctaatagagaacggcatactcgatcagcccattcagcgacgcaaggggaacacatattattttgacaagaatgagatttattctcttgataatgagagcaaattatttccatatgaagggagaataagacatatttttgcagtcaaagggccagatgcagcatttttcaattcaggcgtttggattaaagctgcgccccggtttgaagttggaatgtcgctgaaagaatgtatcgggatttttgtagaaacagaactggcacataggaccccgcagaaactatccccccttgatcaacttatacagtacatagctcggcctgtatatgagcgcgttccaggcaacgacaatgtaaaaacatttgaccgtattcgcataactgttggtctcccccgataccagttcaattcgtgggaagctctgcaaaatgaagtaaagaaatctcaatacgaaatatatcaacgggtaatccaacggttggaaacagaccgtccgttcaagagatatggtgtaccaatcaattttcttgaaatcagtaatgttacattattgcgggacttttcactagagtttatttttgagctgaaggaaccaaaaattaactaaacagggaggaatttagtgtggagcagaaaaaatcaacactgaaaaagatcaaagctacagttatgccgcaaacagcagagggcctgcaaatgctgatggaggaaacagggttaaccatcggagaagtgatcgaccggctgacgctgcaaatgtgtcctgatgacttggggttcgcagtttgttttgcacaagatcaggtttttttcagtatttcaaacttgccggaggaagaacaggaagaagccctgacgaaaatcattatatttttggcagggcttgtgccagtagatcatctaaagggcttagagcaagcagccatttccaagcgtgcagagagattaaaggaatataaggagtacatcgaggatttgccggaaaaggatgcgaaagggatattaaaagaactagctatactcgaaaaaataagggcacagaaataacaattctgaatatcaagaaagtgagtgaaatcgcatgaaaagaaccaaagagatgaaaaaagagtggatagccgagttaaagaaaatgcaaaaatcctatcagggggaaatttccaccgacgatctgccttttgaccttactgctgaacttggggaggttgtgacagtagaactaaaaagtcccggcgtatattacattgcgaccaagaaagcgggagatattccagagtgtccagaggtatatgttgtgacggctgacgctccagctatatcagagaaagcctggacttatggacaggaatttcccggccatcccgatctgcgtgtttatgacattctccagcccaaaagcggaagatatatcatagattttgaaatgcgccggtatcagataaaatgccacctgccggaaatcgaggacgaggattctctatatactgccgcgctctatggagcggaagaacatccggattattttggcgctttccctgttccttcctttactccaagagggttcactgtacggcataagaccattctgaacggtgtgtattggctggaaacagatcgctgcgaggaaatgctggcggtttgttatccaatctggaagtcagatattagtattccagagcaaaaccagggtgagcaactggagtatgaccgtatgtatgggattgacaatacccttggttatctctttttctccaagcagaacagcgtcatcccactgcatgagctttcccttttttacccagaaataaaggaaggaagtgtagttgatatggatgcgctactaaacgcgatttgcgaattttacccggagtatgtcacaatccataatgaagaagaagcaaaatttgagcatggacgttttataaaggaaacgcccggtgttggcacagagtttatcaagttctgataaactttatgctgagggataaaagttaaagaggatactcctttttagcggctgaacacactaagtaatcgaactaaaaactatgctacctacgcagcgtagtttttagtttgatttgctatctgaacagatggcgtgatatactgattccagataatcattatgataagtgttcctaaaacctcagatggcttttggggcttccccatgtaggcagccaatccacaatagaagggatttttatgaatgaacagcaaggtgtcaggccaacagaacgaatgacatatagagatagcacctatagtatcgtctcaaaggttgcttatctaattggcgtcccaaaacgaatatttgagaaccagcatgagccaccgcaactcgaaatattccaacagttagagaatgacaagaacgcccggattattcgtcatctgtgcatcatacggacagcgattgaacgaaatttcaagtacatcaatgataaaatgagaacggaatataaaaccattctttcgctgccacaatttgtccctgctgattctatcggccaactatcagcggataacgtcagttttatcagaaagtggaacacaaaattacctgcacatattattgaaattaaccgaattatttcggaccgtatcaataactgcaagcatttatttcccctctggcttaactggaaatacatccgagagcttttcatcatgcccaatggtctatgcgaaaaagggactcaagaagcagcggcggtctattatgaacacatattgctttatccctatcaaatgtatattcattggagtcccagcgatcagggcaacatcttgttcaatgataaaagatttgtttccctgctctatcgttggcataatgacgagtttaccgagtacaacaaagtctcagacgccggcagttatataaaagacagcatctatgattttattgatgacagccgaaaagtggtaatcgtagtcgattgcgaaaattcagacccctataagttaagcgcgaccctgcggcggctgaacagcacatacactgaaaaaatcacttcgatcatcctctttgacgatattcacactgcttcagcttggagcagcttggaaaagtttacctctgtttcagtggagcatattttgattgagcgtatcaagcaaaacaagtcgttggtggacattcgtctgactgcgagggcttgccaggaatattacgaaaacaacgtggattcctttatcattgtttccagtgattctgattattggggccttatttcgtcattaccaaaggctcaattcttagtgatgattgaacacaataaatgtggaccggatatgaaagccgcactcgccaactcagggattttttactgctatttggatgacttctattccggcgattcagaagaactaaaaacgaacgctctgttgcaggaaatgcgtgattacatggagaaagccgtccagttaaatgccattgatatgttgaacgatgcgctccgctccacccgaatagaaatgacttcggctgaacgccagcagttttacgacaaatatattaagacccttcaactttcgatcaatgatgatggtaaagtttcactggtcatcaaggtaaagtaaagatttctttgcaatttcagggactcgtatgcaacagcggtttgattcttaatactacatagaaagtccagctaataaaaatcaagagaacggtagaaacaggctggtggcctatgcccgccgctggccggagcattgttaggaggtggacgacgacggctggggctgcaagacctttgaaatcgacaagggccgcttctgtttctggctgaccgcgccatacagcgaggaacgccaggaggcggcgaggaagttcgttggaaggagggactttggatggggatattggggctaaaacttaggacaaatactccctgtgcagatgtgattaaaatattaaaacaatttgatcctgacgcttctatatcaaatctccgtttcaaaattatacacaacgatttcgtttatgtttgtgactacattgatgaagatggaattatcaccctgttaaacttactgcatgaagttgaagctatcaaaattgatgtggacatatatgaacaatcagaaaatggagatagaaaagtaactccatttctattacaaaatttattggagcaatataaagaaattgcacatcaaatacaggaaatcgtagatttagaagcagaggactaaatccctttaggagctaagtccagctaataaaaatcatgagaacagcagcaacagactgggagcctacgcccgccgctggccggagcattgctgggaggtggacgatgacggctagacctttgagatcgacaaaggccgcttctgtttccggctgaccgcgccatacagcgtggaacgccgggaggcggcgaggaagtttgcgatggaacacagtggcgtcgagaggttgtagtaaataaggcaagagacataataggagtaattataatggaacaggacggtattgtgtctgtatgggctggcttttttgaggatgaagcatccttaatggcatatgccgccgaagaaggatacgacagtgaaggaaacaaaaagatttccccctttaatcaggattttttcggtggtaacacgctttggccttttgaccctgatttttgggaacgaaatttggttgaacccactatggatgtggaagctttggttgagcgattttctgaaggcacagccataggcccagaactgaaaaaaattttcccaaaggggttagatagggattataatgcggcgattttggtctacaactacaaatatgatccgaaagaaagcaagtccaatccagatgcaccagtgacctttttgggggcagtcccatgtgatttgggctaacaagcaacttctcatttgttgtggagttgcaccaggaccaaaattccttgggaagcaagggcgcacttctatacatagtctaacggccatgtgtagaagtgctctgcgaggcaaaacggcggattgcagatggaagcaacccgccgtttctgcgtcgctgcgctccgtccaaggggctgcaccccttgcgcggctggcttacgccgcttaccccgcccgcccccaaaatagggacacccgccctgcgtctgtcccccttccgagggcctgacaaccgaacaccgacactctgaccgctcaccgggaacgccccggaggacggccatttttttacccatttttcagccaaaggtgggcaacaccttttacatggcccgccgcagacaggaggagacccacacccaacgctgggacagggacatggattggcgagggacttcccatttccttccttggatggtaaaatgaaattgatttgatgggccgcccccgctggaacattttgctccaaaagagaacggcagaaaaacaaaaattatgtagcaaacggagtagagaggatggatcaatcaatgatttgtctacccagcgacgtaaaaactgctttagaaaaaacaaattttattaaaagatatgagatgctttctaatacttttaacggagaaagaacgcccttaaatgaaaggctgcgttatattgatggtgaaattgttttggacagtcttgcacagttgggatataaagcacattttgaaagcaaggagaaatatttctggattgaggaagttcagataggaacctatacgttctccggcaacatgatcttagacggcggcctggtagatatagtctggatcgtaaaagaaaacggaaatctaatcttagggctgccaataggagaatattccagattgatgattgctccaaactacaaaataaagaagccgatttttggaacttatgaagatttagatgaaatagttgaatcagtcttcaaactatttgaggattttaagaaagcaatgactgcttcgtgaggaaaccagcgcagactgtcccaacctctgtacactttttccggccagcgggcagtgggagggataaaacgcaaaggagatctatatggggatttttgataagctaaaaggtggaaaaaaggataaggtgtttgaagatgaattgatggatacgcagtctgaactgattgcgcttacattaaacatggtcggtaaagcagcagataaaatatttgcctattgttccatagaagccaagagccagatgttcaatgtgttctttgaattagacggaaaaatcaaaacattaaatgaaatggggatagtcccttctcgtgctatggaacttttaagaacaggaacacacggactggacaagattaaagaagtatgtgcgaaatacaactatcccacccccacagagattaaaatgatttatgatgtgaaaacaaaaaaatttaatgttggttatcaatataaagagatttgttcagcaaaaactaatattagtgcaggagaagtttttatgaattgggttacagccaaaaagaatgagagcacataaaaaacaaaggtgcggccagcaggccgcgcctttcctataacccaaaactgaaccccaccgatttcccattgcggaactggcggcggcgctgggacgcagcgcacagacttgcaagcgaaccttgcgggaattggaggacgccggactgatcctgcgggtgcgccgggagatcggagcgccgaacaggatttatgtcctcattccaagaagattaaaccgttgaaaaacagaagaataagccgcccaaaacagttttacaaaaggtttcaggtttgctataataaacgcaggaaattgaggattttgactaatatttcaatgtgcgggagggtttcataatgtggatagttattttagtggcagttattgcggtgctactcattctttacattaagttctataaccatttgcagcggctttccgtcaaggtgcaggaaggcagcgcgggcattgatgttgctttggagaaacgctacgatatgctgtcggaagaaattgaggcagtaaaaaagtatctggcgcatgagtaccagatctacacagaagtcacatctacccgcgcggggaaagaactgaacgaaagcatatttcaggaaaagaaacaactgtctgaggaagcggtcaaagcaatcagcgagacgattgccgaacagcaaaagcagatggaaacaatccggcagcagttggatcagcagcgagggcaggataactcttttggagcggaaacaccgggtatgggggacgacgggctgatcggacatcaggtaagtctggatcggaaacttggcttgcttacttccgcccagcagggactcaccggggtcaactctgccatcaatgcactggctgagcaatacccaaccctttattcctatgcgtccatgcagcatttccagcaggatatttttgacgcagaggaacacttacaagcggcaagacggctgtataactccaatgtatccctgtataatcagagaatccacacctttccttacctacttttggcaaaacttcatggcatgaaagaggcaaagttctacactgtggaagaaaagaaaaaagactttaaggtgcagttttaagaagaaaggaaaaaagatgtatgaaaatggtggaacagaatatcagcggtgtcaagctggagcggctgcggcagaacgctgtaaaaaaacataagattcttcggaagctgctcccggtgtgcctgattttgtttataggattgacactggtgaaaaaccgatttttgtttgtctccatcagtgaatatggctttggagacccagcaacccaggggggcctttggggtctgattggaggcctgatgctcagcgtgatttttgcgggtgccatttttggtttttactatatgctggtctataaaaaagcttatgacctcttttgtatcaatttcaaaaacaaatatgtgttggacactctccgacaactgccggatttttctgaattgcgctacaatgccggaggcggcctttcttatgaggaaatgaaccgtttaaagttaatccccggaggccagtcggtcttttatcaatcgtcagatgaactgtccggcaagctggatggagttcccttccgggctgtcaatgtctgcactggcgaaaaagcttccacaagaagttctaccccaaaaattctatttgagggacaggtcattgttttttcctattttgataatcggaagatcagtgaaggttttgtccaggtgttttctaaaaaagccctgtctaaactcagggaaaccagagtcccgctgtcaattcagacagaaaacagtgtattcaacgaaaattttgcggtgtttgcagagaacgagcagaatgctttttacatcctgacaccccaggtgatggagcagattacagcttttcaggaagctatggaaggaaatgtttatctttccttttctgaaaaatccctgtatgtaacttgcagccagcttcgcaatccttttcatatttacatcgacatccctgttgaagaacagcgtcaaaagattgctgacgatacggcgattctccgcagtgcaaaggaaattctcataagagccggacaaagcagtccgaaataagaaggcagtccttgaaaggcggtaggtatcatatgggatgtacaattgtgttcgttatcctgcttgttattggaatgggcatcctctgttttctgacgggggatatggcggcttttatcgccctgtccgctactttagtcgtagggcttggtcttgccggtattctgtatcatatctataaatcgaagcaaagacggatggagaagtataatcccctatcccctacattgcgctggatgaatgccgcagggtcgatcctgattgcagcaagtcaacatacaaattttcatctactggctggctggcggtacaataacgaatttgaccgggaaagtattaaaacaatgctgtgggattattggggcattcaaggacatgagacagctataaaggaaatgcgcagcctgatcgacgagggaatgcgtgccagctatcggaggaaaatggaactcttgtcgcataaatataaggatgctacagaagtccagctcattgaggaggcccgcaaaaccaatccaaacgcagatgaggacagctatctgccgaaaatgctgatggcctggcggcgctatggggaaaatgccctgttaggctgggacatgggacgttgcgcatatatcacgcaatgttgctatctggcaggttatatcagtatgcaggaaatgctggatctgtgcgtggatgccgggatgaaggcacagtccttttttcagaattgggaagaaatgatggagagctatctgctgggcggccagttctggcagcatgaggataagaatgacccaaaatccatgacggcagaacgatggaagctatatgaacagctctggcaaggaaaaaagccgttccagggttctccgtacctcgctgtcccattcgaccagcttctttccaaagaggtcatcaccaacgaatacggcattctgccggaataccaaaaatattataatcatggatagttagctttcggtacagagtaagcattgatagacgtgtctacaaatactttggaaatgttaaatttgactattaagtaattggaaaatcttttcaggaacgaaatgcacacgtatatggtctaacagccatgtatgtgtgctctgggaggcggaacggcggattgccagatggagcaacccgccgtttttgcgtcactgcgccccgtccaagggactgcgccctttgcgcggcttacgctgcttcccgcgcccgcccccaaaaggtaaacacccgccctgcgtctgtctcccttccgaggaccttataaccgaacactgactgcgcaccgggaacgccccggaggacggtcatttttttacccatttttcagccaaaggagggcaacatcttttacatggcccgccgcagacaggagcagacccacacccagcgccgggacatgaatcggcgagggacttcctatttcctgccgctggtggtaaaatgaaatcagttttacgggccgctccccgctgggacaaagtacccatccagtggaaaaattgttgatttagaaccggatgtaataagagggaaatgaaaatggcagagcataacgatgatatgacctataaaagcaggtttcatttcatgtgttcctgctatcgattgccggaggatggaagttttacagttggtcaagagtatgcttttgtgaacactattgacgtagttgagatcgtggatgatttaggacaagttatggtatttcctgaaaaaatctttgagtcttacttctgcgactttgcagatcctgtgtatcctgtaacttctttggggcctatagataagacgatctatcatctctattttgttttggatcaagggcaccacagtttagacgcaatcaaagcgtattccaaattgttcaatgtgaactatgtgcaagcaaagggcgtattaaacgataagcgggttttgattgctacaggaagtgctcatgatatgagagaaatactgaacgaactgaagcattttcaagtgcattatgagatcagtccaccctacggctctgcggggcgctgaactgtgatattgcagatgtgatcgctttggagcaggatgaaaattccataaatgaaatagagtgataaattaacataatgggaggtgcgctattactatgaataaagattttccactaaaccgctttaattttacaaatctcatcaaacatattagaacagaaatattgataccaaatgtgattaccgatgatgaaacaggaatagaattttatggtggggatagcattccccaaaaggcactgattgacttactcaaaaatttcaacataattgacaatctggttcaacaaagcaatagcgaagaatttaaaaagcaaacacaacttgatattaagaattttcagtttgaaccgtcatgggtaaaaattactcctgacaatattacggttggatatgtaggaatttatgtaaatgctgatttcagtttaaccttttcaaacatcaatgataaatgggttttggagaaataacaacttcccatttatcatcatcgggccagccagcggacggaatatgagaaaatgacagcgcaaggcgaaacattaaataacctaaagggggaatttcaatgctaatttctaaatcagagtattctgttacggaggctgctctctccaaatacgaaacggcacatggatttacctttccgcaggagtatcgggccttcctgctgaaatacaatggcggcgaaaccccggaaaccgacttccgcctgtccggtgtgtcatccgatctggtttctttctatgagctacgggacgatggggacggactggaactccatgagattgaacttcttgtgcccgcatttctgaaagatcatatgctccctatcgcttccaatgtgtttggcgataacattttcatctgtgtggagggacgggaaaacggaaaaatttttttccgttaccatgacaggccaaagcgatatatcaaacttgcggatgactcccgtacttttattcagaaatgcaaaagcaaaaagctggggcgctgctatacgattgaagatcggattgcgatgagaagaagcgcagggaactttgagcccccatctgcgattgcactttctgaatggcaaaaagagattgattactttaaccgtatccaccaagagcaagtagagttttgactgctgttttgcccagccagcgggcgcatagtaaccaaacaccacctaccaaggcacggcagacaggccgcgcccccgctggggcaaagtgtcctaaagccgggggcatgaccgccccgcccaacctctgggcactttgtccagccagcggacggtggaaaaagttgagggaataaaatgggaaactatgttataaatgaaatctattcggatgggtacgaaagatttgcaataatagaagatattgggaaacatataaaaataaatgtgcattttcttgagtatgatgaatatttggaaagtagtgaaaattctcaaaaaagaacaaatggagatatattggatggggacttatcaattcaactgataacctttagtcgaaaagtagatgtaaaggaaactcttatccattttcaaaaaatacaaaactctccacatatcgaagcagttatagaagcgactcaaataattgatgaatattccatgtatgcgctttcaactgtatcagatagtaacattttggttgagtttgaaaatacagtcagctataaagtaggagacagagttttggttattggatctttagaattgaacgaaacatcttaacaaaaatagtgtgccaagcgaaatatttgcgttgccccacctctggacactttgtccagccagaaacggaaaatcaaacaccatccaccaaggcgcggcagacaggccgcgcctttcccatgaccaaaactgaaccccaccgatttcccctcgcagagctggccgtggcgctggggcacagtacacagacctgcaagcggtcctttcgggaattggaggacgacggactgatcctgcgggtgcgctgggagatcggagcgccgaacaggatttatgtgctggtgccgaagaagcgggattgaagaaaatcctgcggaacggtataatggaacgtaagaaatcagcgccgccatacagcgaagaacgtcgggaagcggcgaggaagtttgcgagggaacgcaatagcgttgagagattgaaaagttaggctgaaggctgaaggaggaatacaatgtcaacggcaaaagaatatttagaaacactgtaccagcaagaacctcaactgttttcagaaccattgaaaatgtcaatattggtagaacccgatttgcaatttatagaacagcagataggtcatcggcttccaaaacaatttgtagagttcttaacaacttatcaacttccacaaatgacaatgtttattactttttgtggtgatttagcatctgccttatacaaaactttttcaagagagaaaaacggatatgttttgagtaaatcagaagagtttgtagtggtcgacttcacatggaacggcatgaatgggaattgcggagttgactatcttaaaaactttgaacggtatgaattgtcagaagcatggttaaaggccggttttatagacatcggaagtttctatatggaatcctaccttgtcttttatgaccttgtgacggaaaaagtttgctttatccataatgaagatataatggaggcttctgtcgattgggataacataacgaatatcagaacttttatgttagaaaattctcgtttattgggcaacagttttaatgactttttgcgtactgtttgcactggggaaccgtatgatgacgaaatcatatttttgggagaaaaatccctttaggaactaagtccagctcataaaaatcaagagaaaagcagaaacaggttggcggcctatgcccgccgctggccggagtgttgccgaaaggtggacgatgacggctggggttgcaagacctttgagatcgacaagggccgcttctgtttccggctgaccacgccatacagcgaggaacactggaaggcggcaaggaagtttgcgagggaacacaatagcgccgggaggttaaagaattgatgatatatcgtgggggataataaaatggaatatggctatgatacattttcaaccgtactgccaggtgatatttttgaattgttacttgaattaggcaacgaaatgggaattgatcctttttcaagtattgaaagcgaaaactattttcgtgaattgttgaaaacttattctggtaataaaaatgaggtaaaaagatactttgaggacacaatcaaaagagatttccaagtgatgaaggaaaaacctcgatggatacagggggacgagtggcaatttcataggggcaagccaatgattttcgtagggcagcttgatacttccataaaacgcgatggagtatcatacggaatttcgttttttgtcttttgggactataaggatggtgtcacgaaaacagtcacgcaaagtgattaaaaagctatgcgctcacaaaatccttttaggaactaaaggcgcacttctatacatagcctgacggccatgtattcgtgcgctctgcgaggcggaacggcggattgcagattaaagcaacccgccgtttttgcgtcgctgcgctccgtccaaggggctggtctcgcctgccagctcggtcggcgcttcaaggcgtttcacgccttgaggtcgccaccggcgacccgcgcccccttgcgcgtcttacgccgcttaccccgcgtacccgctgaaccgatacacccgtttgcgcggctatatcggttcggcgggtctgaaaaccaaaaccgacaccctgaccgctcaccgggaacatcccggaggacggtcattttttcacccattttcagtaagggaaggcaacaccttttacatggcccgccgcagacaggagcagacccacacccagcgccgggacagggatatggagtggtgagggacttcccatttcctgccgccagtggtaaaatgaaatcagctttacgggccacgcccccgctgggacaaagtgtcccaaagccgggggcacgaccgccccgcccaacttctggacactttgtccagccagcaggcggcggaaggagacgaagtattgagcaggagagaaatataccgaaggacaaaaggctattccatttacggagtagtaaatgtcaaaatattttccgccgcagggattttgatggttgtcgcccttggtctgaaaaatcctcaacttatattggacagtgatatattatgtgtgtctgcattgtgtggcgctgttgcactgttttggattttacgctattggaaacactggcttgacattttcaaaaaagaccttattctttttgaaggcgaagttttttcagaaggcgcggtgccgggatcaaatgcggaaagctcttgggaaaattggcggcttacagaaaagggaacggacgcgccgcggcattttgttatttgtttacggcagatgaaaaagcaatatcaaaacaatgctttgatcccggatatgtgccgtgggccggtttcgtttttctatctaaagcggacgaaatgtattgtagatattgtgagtatttccacgcctgaacaagatcaccgaagtagacacgcgcagaaaaaagcaaggcgaaaagcccaacatcagtaagctcctcgcctctggacactttgcccagccagcggaaggtgaacaggaggaagaacttatatgggattttttgataagttaaaaggtaggcaggtaagagatcagattaaaaatgaagcatattttagaaagtatattcaacagcaggaaaagcggatcgaccgtttttccgatatgataaagcaagaacaagtaccgaaagaaagaatttgcctggttgaagcgtttatagccgaactgaaatcttcggtactcacagcaaaatatagtatgggtgccgaactgaatgatttgagtaaggaatggcctgaagttctttgcacgatggcaaaaaattgggacactaccatcggtcaggcagatcttataaatacagtagctcttgcggtgctgtatgaggtggatggcacaacatgggacattgtttcaaaagctgcctgtcaatacgggcgaaaagattggctggttggatttctgctttcatcgagagagggagggccggactatcagacatggaaagttgctatgaaaaatccccaccaaaccttacgcaatatcattgaaaacagcccccaaaaagccaaggacatcaaaacatatttagaaaagaaatggtataaaggtcattatggtgttgcatggtatgatactcataagtccgaccaaatgacttattatggatattggagcaacgaaactgcggcggcggttaaaatattgggaatagacgatagctgcctgaaaaaccagcaatattatccgtatgatctggctcacttcaaaaaataattttgtgtctaaatcaaaaatagcaacatcacaccaaggcgcggcagacaggccgcgcctttcccatacccaaaactgaaccccgccaatttcccgttgtggagctggccgtggcgccggggcgcagtacgcagacctgcaagcgggccttgcgggagctggaggacgccggactgatcctgcgggtgcgtcagggaattggagcgccgaacaggatttatgtgctggtgccgaagaagcgggattgaagaaaatcctgcgggacggtataatggaacgtaagaaatcagcgccgccatacagcgaagaacaccgggaggctgcgagggaacacaatctcatagaaaggatgaagaaataatggagagttgttcttgcggtaaatatcaatatggagatgaagcaaaacttccagaccctgcttggcaatatgtgaaagagggatttatgggtacagtttacaaatgttgcaaatgtgggtgtttatggtttaagactataagtagcggtataattggaatgcccatatatattaaatcaaaacctgatgcagactttggaaagccaagtccagcttcagatgtcagacttgaagatttacttgtaaaaaagtaacgggatatataagagtggcaaatataagattcctttaggaactaagcccagttaataaatcaagagaacagaagaagcaggctggtggcctatgcccgccgctggccggagcattgccgaacgagggaacacaatattgccgagaggttaatttatatataaaggtgggaggtatattgctgtgacttcatatcacatggtttttaagaatggttatttcgggagtattaacaaatgcggtggacttccaacacatcttccagagatatggccgcaaatagacggagcagacttagcctttctatttcaactttattgtgatggagaaaagttgaacataccaaacactctttgtatacaagggtatcagttgtttgaaaaaggagattacaattcggacattgtagtgatccaacttccgctcgatgcaaaagaaaatatccagcaggtaggtctttcgtgcccggtttccccggactatgcaggcggagatattgaatttgaagtggtagaagaacaagacaactacgacttggacgatttaaatgttgatgacttttatcgatggacaaaaatgggagtaccatgtagcaaactgctgggctggtgtgaaaaagaaatcatcccatcgaattgtgcgtttttagggtggttagcagatgaagatccttttgtcattggcaacggatataacctgtgctttttcttaacaccagagggaaaggtcattgccagctatcgtgcgccctgttaatatccagtccagctcataaaaatcaagagaacggcagaaacagactgggagcctacgcccgccgctggctggagtattgccgggaggtggacgatgacggctggggttgcaagacctttgagatcgacaagggccgcttctgtttccgtctgaccacgccatacagcgaggaacactggaaggcagcaaggaagtttgcgatggagcacaatgtcgttgggggatggaaaggattaaaatatatgtccaaatcaaaattgcagttatatcaatttatgagaaagcaccggtcaaaggtgttcaagttgatgaaggaataaatattcttgacaagctgattaatagcaataattatccgattgaacgatcaacgattacgaccataaatggaacagagacataaggtgagcgacaaagcagaatttatgggaggtgcgtatgctttttaataatcttgtggatgcaaaaaatattatgggttcagtcacgaaactattgcctatagataatccatactatgaagattttcaattttttagttccatcaactgtactacttcatcagagtaccgagaagaattaaaatcctttttggaaaaatttataattaatcatgcgatactttccatgcctgataatgtcatgaatatatatccgttgctggtaaaattatatggctggctgtaaaataagacaattccagttcatcgaggagctgcaccagcacaaaaatccctttaggaactaaagggcgcatttctatacatagcctgacggccatgtattgtgaaatctgggctgatttcacagcggcttaaaaagggaactaaacggatgccctggactaactgtttccggtcagtccagggcgaaaaaatacatcaataggcgggcgtaccgtatccatagatctcagcgtgtccaatggcgtactgacgctcccggcaggcattgcctgagttgccctccacggtgtagacgatcccgccatccaccttttccacgatgcccacatggtctgccgctccgtcctggccttcgtcctcatcgtcccagtcgaaaaaaatcaggtcgccggggcgcggctcatagctgccgtcctgccacagccctctctcccggaaccactggatgccgatggagcagcttgcgaacttggggattacgccagcgtccagatagccgcactcattggcgcaccaggaaacaaagcaggcgcaccagtccacccgactctcaaagccataccaggaccaatagggctgaccgcctacattgccgagctgggagagggccaccgttacgatctccccatcacctgtgccaatgccgtatagaacagcactccacataccgttgctttcttcagccagtaactccgcaagcatctctcgctggtcagcggtaaaattgtagatgtccgccatttcatccgtggttttgtgggtcacggtaatataaagggtcgtggccgttacctcgacttcttccacaatgatattgccctttccatcatcagtttccacggtttgggtggtggttgccgtttctgtccggtggcttatctcgttcatggcccaaaatatctctttcaggagttcttttttcccatcatccatcgtagcgacttcctggggattgtccgggtcggtggtagttttcacagcatagacagccaacacttcgggccagacagcacgggagccggacagttccaggcggtcatgtgcggcgctgctctcaatttctcccagcttgctctcgtattccaagttgatctcccggacaacggtgggcatggtctggcccgtgccgctgtcctcaccagaaaagaagatgccaaagggagaggcggcgatcaggccaatcaagcagatcaccacaatggcaaggatggcaacccatcctccagcggcgatagcagtcaccagcgccttaatggacgcaagcagcgcctttgccgcagcggaaacgccctttgcggcggcttttgcggtggtggcggtggcctttgctgtgacgcgggcggcctgggcggtcgctctcgcggctctggctgtggcctgcgctgtctttgctgtatggtccgctgtcttgatgacggttttcgccgtgcgtggagcagtcttgacggtatgctgggcagttttaatcgttcgctgggcgcgcttgatggtgtttttcgtgcccatgccagtgtccttcgtagcctgccccatagcctgggcgggctgctttgccgtttttacgggaagttccttctgccgggacgcttggacggcgttttgggtcttgatttgcggcgtccggtcagatgggacggcctgttttttgacctgctgcttccgctcggcctgcttcttggcaaaggcccgacccctctccacataagggcttgtggtatccgttggacgctctatgctggcctgggcggatggatgctccgccatgtgcttatgatgcggaaggcgctggcgttctggggccgtccctccgtttcgctgcggagtgtgagcatccggggctataccctgggccggtccaggggcgtgggactgttcagcgggggccgtattctcttggcgcttttctgccgcccacttctcccgctggcgctgaaacagcttccggccctgtcgcaccgccgttttcgcgccggacgcggccacatttaccgcatcgtgggcaaggtcatcggcggcaagctctgtcttatccgcggcatactcattgggcgtggcctgccggtcatccatcagggcctccgcgttccgcttggaacggaggaaggaacttttcatgcgctggccgatcatggcggatttatccagcactttaatatctttactcttttcacgggtcttgatcttactcatggcttcacacccgctcgtcttttcatccagcggtgtttccactcagcaggggccacatagtagtccctgtggcgctggcccgtccacacctggcctccggctatgccgtcaaaagtaaacccagcggccagcaaagatgccccggtttccgatgccagcgtataggtgatgatacggtcatagcccatatcaaacccgatacggcagcaggctccgtagagcttggaacaggcgttgtcagtcccatccgtgcagcagcgcaggatctcaagggtcagcccatcgtccagataccgggcaacgggacggccacagatggcaacgccgcacagacggtccccatcatagcaggccacggcaaatttaccgcccacgggtgggatgctgtgccggtgataccggcccacatagtcccttgcggcccgcaggtggcatggcttgatgttcaatggcattttcatccctccaatcaaaagggggacgggcatcaggcccgtcccccggaaaagcggccctcaccgggccgggtggtcatcaagcggtatagctccgtgttgtgcggaaaacgattgacgaaaggcaccagggcagaaccgtatttaatcaggccgcacccggcatccgcattggtgatatagctcatctgctcctcggagatattcagcagatgggccagcttctcccggtcgcccgccgcctgattgagcatgacgatgaactcggagttactaagcatggtgctggcctgcacggagtccagaagatactccacattctgggtgatggcggtggggtaggcgttgcgcttgcggaactgccgccacgcggagttgaaaaaggcggcggaaaactcgttctcaaacatcacatggaactcgtcgataaaaacatgggtgcgcctgcccttcttccagttcagggtgacgcggttgagcatggtgtcggtgatgaccaggtggccgatgggcttcaactgttcgcccaggccgtggatgtcgaacaccaccacccgcttgtccaggtccacggtactgtcgtggccgaagatgtccagggagccggtggtgaacagctccagcgccagggcgatctcccgcgcttccgcctccggctgttccatcagcttttcacggagagcggcgagggtaggaactgtaccgttctgctctgcttcttcatacaagtcccccgtacagcggtcaatgatggacttctgcttggcccccacgcccttggggtcgatgcgctccaccagggacatgatgaactgcgacttcaccacaatggggttgttttcgccgtagccgtccaccatatacatggcgttgagccggtctttccccccagcggccacccggatcacgctccccacaccgtccatggcttcaatgaggggggcgtattctccctccgggtctgctatgagaatgtcatcatccgtattgagaatgaggaacacaatttcctctttgacgctgaaggacttgccggagccgggaacgcccagccggaaggaggactgattgagcagattagccttgttgcacatgataaggttgtgggagatggcattctccccgaagtagatgccgccccggtccatgatctcctgcaccttgaagggtatgaacacggccagcgattccgtggtcagggtgcggaaggcgttgatcttccgtgtcccgatgggcagggcggtgttcaggccgtcgatctgctggtatttcagcaccgccagttggcaccgcccggacagggagcgtatcttctccgtgtcggtgtcaagctgctgcttggtgtcggcggtgatgacaagggtgagaacagcctgcatcatccgctggtcgcgggtggtcaggtcggccaaaaactccttgctctccctgcgctgtaattccatatcgtaggggacgatggcggagaagttgttgttctgattttgccggcgctgccaattcgtgatattcgtctctacccccagcagacggttctccacctcccgcacagcctcgtccgtgggcacattgaggatgtcgatggacaacatcatattgcggtccaggtcggtcaggttcgtcacgatctcgtcctggatatagttggcgtagtccttcaggaacagcacccggcaatagcggtcgcccagcttcagatagtcactgtgcttctcaatcccgtccgggcagatgtagtccttgaagtcgtgacccttccgggccatatccgccatatcaaaatgaaaattgccctcgtctccggcccggtagaaatcgtggagaatacggagccggtccgtggcgtccagctccacgcacttggagccgagggcggcgaagcgggcggccaaatcggctccgacgcgggtgaagtaggcgcgggcgtcctcaatatcccgcttgtagactgtgatggtgacatacttctcctgggtgatgccattggccccggtcgccttgtccatgagcatttgattgtactccctgcggtacttgtccagtccgtcctcccgcatgggcatgaggacagactgctcaaagtccgcttggctttgacgacggttgcagatggtgagcttggtggtagcggcgcaatccaggctgttcagcagttctgagtagacccgaaacatggtttctttatcctcctgaccggccaccttgtaattgatgtcggtgaagcggtaggtcttggagaacttgatgcctaccttaaaaatgccgtccggccagacgcattgaatggggatcacatcctgcaccctgcgggggatacggtacggctcccggtcctgccgcatgatggtcttgatacttctaatcatggcgcttgtattcctccttttcccacttgtctatgctgggcttcaagagatcgtaatagagggtggacgcttcaaagcgcagttctctgggttccagcacctccgagcgcagccacgcccagatgaattgctccgccgccatgccgtggtaggtgaaaaagcccagggcggcgaagggggccgcgcccagaacgcacacccaggacacagtttccgtaccggcatagggcttcatcagaaagtacagccccacggccactgccaccgccagggcagaaaaaatgagctgccgcagagacagcccgaaaaacatactctccgtgtagttacggatctcgcggttgattttgacttccaatgtgttccctcctgtcatcgctcctggcgttcatgctgtttccggctgcgccgccgttcagcggccagggccttttgacgctccacctcttttgcggcggcgtccaaccgctccgctgtgacatagtagttcaggacatagcagccgaagtcaggataaaaccaggtgagccgtttctgatcgggtactctccgggcgtcctcccatttaccgacaagctctgtctgtttctcaatgcgctgccgcaaggcgggggcatcgtgtacttggtcattcatcggtggtgtttcctcctttatcgctccatgccccttttctgcctgggcggtttctggtgggagggataggggataatctcctcctccccctcaatgatgctgaactccgcgcgcagaaaggagtgggtttcgcggctctgccacaggcggatcatctctaacgcttccgcccgtgtttccatgcggcctttctgcaccccgtctttgaatagataaaaccgtttcatccaatgtgcctcctataagcccatcatttcccgtaccacatggtcggacatcttgacgctgcccaccaaaataagcatattaaaggtaatttcgccaatatagctccacaccatcgaggccgccgcagcgtccgggtcagcaacaggcggggaactggcgaacacggagaagatgatacaggccagcacgatgacggctccctccagacagacggcggcgtagcttttgagaaagctcttgcccacattctggctgggttccccggcaaaagtagacagggggatgggggccagcgccgcatacatatacatcttaaaaaagcgcccgtagacgctcaggatcattacaaaagacaggacccaaataagaagcccgccgatcagcgtcaccgcccatagggggatgctctcaaaaaagccgcaatcctcaacggctgtcacgatctccgcgggtaaaacagtggacgatggcgcgccgaagcccgccgcgttcataatggaggacaccacaccctggatgatgtccagaagggccagcatcagctccatgccataggtgatcagggcctttgccagaacaaagcggacaaacagcttcagcgcgtgttccggctttttgacctccacaaagctgccgcaggtcttgaccacgcccaccacaaagaacaacaccagcagggcgtagccgatggcctggagcgcaccgtgaatgtccgctatcacggcccagatcgcgccgcccttgaagtcctggggggattgggtgataagctgccagatctcgctcaacttgccattccagacctccagcgcattttccaggttttgcacgacccaattatccgacacgcaaagcacctcctttgggggcaggcttttggggcctgccccctgtgttcggataacttggcatcatcagccggtgataagggtcagaatttctttggaaaaggttataacaatgccgccagccagggtgaggaagccgttggaccgctgggaggggtcatggctctggagggagaggcccacctgaacgatgccccagcccagcaggatcaggcccaccgcccggatcaaaccaaaaatgaactccgacaaattgttgaccacctccagggggtcatcggcggcaaaggccgtcatggagcagcagcccagcagggccgcggccattaccagcgtgcagtagcagcgaaagcccttttttaccttaccgggcatggggagccgcttattttcctttttgttgttcagcattttcttgttcctccagttcaatgaatttttgttccaactcctcctccgtgagaagaatgaaacgatgtttcggcgcgtcctgaccatccttttccgctgcctgcttcaacagctccttgtcaaagcggatagacacgatgctgtggacatcctcaccgtgccggtatggttccgccccgccgtctgtggtgagtttgatattgggatgtttaaggatgtcatacttgaggtcccgcacgggccgctctccgcgaataaaaagaagcgcgtactggttatccagcatacgcacttcatccggcatgagcagttcccggcccgtgagctgccagttggtggagtagctgccgcttcttcctttggactggccgtaggtgttcgtatcaatggtttccttgcccagcagcttggacacatactcatgggtggattgctcgttgccgcccatatacagaaattcatcgcaatttcccacaaggctctcccactgcttttcaaaaagggccttgagctgggcgaggttctggataatgatgctcacggagatttcacggctccgcatggtggcaagcagtttgtcaaactcatcaggcagtgcgacattggcgaactcgtccatgacgaaatgcacatggacgggcagcctgccgccgtgtaccacatccgcctgatagtagagctgttggaacagttgggtgtagagtaggccgacaatgaagttaaaactggagtcattgtcggggatcacggcaaagatggccgtctttttttcacctaaactccacaattccatctcgtccgtctgcgtcatgccggccagcgattccagattgaacttctccagccgggacaccagcgtgatctggatggacttcagggtcttgccgctgccggagcggtaattgtggtaatatttcagggcgatatgctccgggtcccgcatttccaggcggtcaaagagttcatccaacggggattggtaggtgtcatcatcctcccggacctcgccagcccggatcatttccatgaccatggagaagttccgttcttcgggcggagcttcgtagtggagatagaacaccagcgccagcaagagcatctgcgctgcctgatcccagaaggggtcctgtgactgtgcgcctttgggcgtggtgttcttgaacaggttggtcacaagccgctggatgtcgttgtcgttgcggagataggcaaaagggttgtagcagtggcttttctccatattgattaggtcaagcaccttgatgtcgtagccgtttgcttcaagcagtcccccggtgtcgcgcaagatttcacctttgcagtccagtatgatcaggctggtgttggcgttcataatgttgggcttggcgtagaacctggtcttgcccgcgccgctgccgcccaccaccaggacattcagattgcgccggtgtctgcggccatccagtccaatggcgacattctgtgtgaggattttgttcgcggtcagctccttatccgcatatttcctgttgattccttttggatcgccccacttggcgctgccgtgttcctcccgcctgcggtagttgcggtcggtggagaggtagacgccaatccccagcccatagcagagcagaaaaatgaggacagttttcaagctgtcctcacaccatacaatgtgaaacggatggtccagcgcggccccgccgtaccgcaccagccccaccagtccgccgcccatatagggggccagcagcagggccagccagaccacaggaatgacgccgcaggcgtagagggtcaggtaggctttggagaacttatcttgcctcacggtcagccctccgtttctcccgtttcgtgggcgcgtctatgattttgagaatgagatcgtccacatcttcggtgggtttgccgtcccggagcgcatcgttgcggaagtcagtcaggccccgcaccataagccgctgttcgtagtcattcagcgtgaccacacgcttctcatcacgcatagagcgccctccttatctcgcctcgtcatctcggttcttctgcgccttttcctgggcggcaaagagtcggttcatatcggcggagatactcccggccacatcccgcatgacacccgcctcagcccggagcgccctggcgtccatcccggcatagctctccggcaggcgttcaaaggaaaagccctctaccgatacgccatttcttttgcacagcatataagacacgctgtacgccgtaaaatcggggctttcacaggtaatcccatcacggtccatgtgggcgcgggcaagctcctgggccagcccccggaagatggtaggggcgtccaacccctggcggacatagacggtatgctcctggggatgataggccacattgacgccctccggcagttcgttggagatagcaaaccggcagggggcatcgttcatcagggccttcagcagcaggcgttcatcccggaccgtggtgggggcggggcgctgggcggccctggtctgggaaatgtcaaagaccttccgcacattgtaggacacgcccacgctgccatcgtcccgctggtactccttacccggttccagaatggtgatagcatccgctcctcgccggacatacacgccgttggctttccagctatcgaagtcggccagtttggtggcctccgggcactgggccgcgatcaggatggcgttgctcacggagtagaggtcaaaccgggcctgcacatccaggtaggcttggaacagcccgccctctctgcccatatcctgcacatagctgtcgatcatggcgtagacgccctcgcgctccgcctgctttcgcgccgcccaaaccgtcttgtcaaagggcttctcctcctgctgggtgggctggccggtaaacagatcatcatagttcggcatacattacctctccttttgctttttgattttcttttttgggggtgctttgtgctggaccggcttctgccgtccagcgttctctctggctttctcctccacccgctgcttctgctccgcccgtatctccttcaatgcctgacggacagagggacggggacgctccagtggatcagggatacccggctcggcggcctctttgggctttgaggtaggctcggacagacgggatttctcggtccggcccacggtggggttttcggtcctgccctcctctctggcagaggacgcgccccgcgccgccttcaaaaactcatccaggtcccggtccggatcgtcgcgctccggaacaaccgggccatgttccggggccggggcaagcatggcgtccagaaatccatccatctcccgctcagtcatcggctcctggggagtgtccaccccggctgccggttccgccgcaggtgtttccggggcgtccatccgccgctccacccggctctgttcgatctcctgcttgacctgggccatatctacggtggcgaggccgaaccgctcaatgatgcggttgatcttgccggcgtcctccgccctcgccatgatgtcggtcagtccatccgtggcgtcccggtccttcaatacacagtagaggacgccgtacttttttgcctcccggcaaaagagcttgagatcgctgtccttgacggcaaacaccttcagctccttgccgctgcggagcatattggtcagacgggccttgcccgctgtctttttctgctcccgcaggatggcatagatcaaaacggcaagctgtttggccccggagccggccagcctgaccgcaacctcacctgtttccagcgacatcctcacgacttgctccgccgcgtcgcctgaataactcattctttaactgctcctttcgctcaatttccttttgcttcaccagccgtcccaggttcccccggacctgcccggaacgctgggcgatgccgtcacataggaccacctcctttcgcgccgccctgatcctgccggacagggaacggatattctgtttcacctcgtcaatacccgcggagtcgccccgcctggtgagccggcgcaggtcctttcggagttcctgccgctgggcggtcagggtgtccacctccatcaacgccgcttcccggtgggcagtcaattcctccatcgttccgatgtggtgtttccccaaaaaacgggtttcggcgtccagccggtccagcttggcgatgtcctcccgtaataaaaaagacacccgcttgacggatgccggacgcttgacgatgatgtggagttcgtagcagtagcggaagtacagcgcccgcaggccggtgactttcttctggggctttccccgtacccggcaacgccggggcgggtgatggacaagctccgggaacgggggctgcttgtgaatgttgcgtagaatacgcgatctgatctcctccagcgtgtagccctcgcccagcttgtggaagcggaaatagccccttgcgtccgggggcttcaaggctggatatttcaggggctttccatccttcccatgggtcttgatctgatagcccatttcgcccatcacccgcaggaagtcgcgctcggtagtggaagcgcggatagcccggtcgatgtcggcccggatagtgccccggtgggtggtttttccatcacgctcggcccgccattcggcatagtcctttggctgtctgccagggttctcgatcacggaaatggcgtattcccggcacagatggtccgatacctcccgcattcgggcgtagtcggcgggagaattgtagaatttgtagccgtccataaaggacacggagttgatgacaaagtggttgtgatagtgtccggtattgcagtgggtcgccactacaacttcaaaacgcccgccccacagctcctccgccagcctgacgccgatctcatgggctgtctccgccgtgacctcatccgctttgaaggactgatacccgtggtagcatacccgcccccccgacttgccccacagccgcttcgcttccatgaactgcgcggcggcggtgtcctcccggcagttcaggcaggacacataggaccggcgctccgttttcatctcgtcggcggcatactccaccacatcctcaacggcatggagggacgccagctccggcaagccggcctcagtggtcttttccgggttccggacgtagtcgattaccttgtccacgcgcccatgaatgggccagatggaggtcacagccatgtcagtcggaaggcacggtataggtgtccgcgatcagcttctccacagcccggttatcctccagtgccttgcggagctggggcacatccagcaggccgagggcattggcccgcttcatgatctgattcaggttattccccacgcgccgcacctcctggatcagcacaggtacatcggcgggcggggcctccttcacctccgtgccgttcaggacgcggcggcagtaaccctcgcgggacaggccggacttgcgggccttcttggtaagggcatccagttccgttttggtaaaacggaccttcatttcaagtgttcttttcaaaacaatcatcctttctcaatgcagggtcataggggcggcaagcccctgtcaagcggaattgtggccccacaattcgttgcttgctaagacaataccgccatcctccgcgcctgcggcgcgtgagtgcgtgcgggcttggcctctccgttatcgctcatgctctttttcgattcgcatgagggccttcgcccgctccacttcatcggacatcatatagcaccgctcaatttgccagccgttcttgccgccgtactccgatgccatgtactgttccagacggacacagggatcggagccatccagggacgaagcatagatggaatatccgcccatattaggccgaaacgccttgttatcgctggacaccgcataggtacggctttccacggaatactccttgtcaaagctggccggagagaacacaatgaagccggacaaatgctggcgggcacgttctgctgcgcgaaaataacttcgcatggttgcataggtcatattgacctcacaaagggccttttcactcatggagtgacaacctcctattatgatttttgcggcatcataggtgatgccatgcccctcgacgggcgggaaaaagcggcatcacaagcgatgccgctaaaaactgttcaagaagtcaaacacggcgtttaggtcctccgtgctggcttctgcctgcgccgctggccggtcatagccgttctttgtggttcgctccaattcttcagatacggtctgacggatcaactctttcaacacatcggtttgctcttttgcgttgatcctggcgatgatctcctgattgatggatcgggcgtccatgcggtgcagggcttcccacgccctgcgatcattctcccggtcaaggttaaatcggagcgaaaaccgtttgagtttcatccgctcacacccctgtgcaaagcctgctcacacaggaactcatagcccttggcggtggcgcagatgtcctcgtagatggtcacgcggtcggcgtcatacgccccgaagttgcggaccaggcagcttccgccgcccagcacatggagccgcatgagagctgggttgtactcacgctcccgcaggatgcggaaaatctcgcccacatactctgcggcggtttcccggattgtggtcagatagtcctcccgaatatccgctgtgccgaaccgcagcacccggttgatgatcgactcgtccaccgtggcatggtgggtccgcatg

SEQ ID NO: 345 - DNA, 76199 bp, Flavonifractor plautii
  source 1..76199: mol_type = genomic DNA
gctcagacagggtctgtctggtgctgtatgtatgccatacgcccatgtcgctcgctcctcgcttactgtattttccaatttctggctacagtatagcagagtgcctgtccgatttcaggggaaacgtggcgctaccactccaaaatccgccgggccagccggcggagaaagagctcgttgctgggccgttcggccggaaggccgcccatgagggcctgatactccccgcaggccccggcctggagcttgcccaccatggagcggatgtttttctccacgcaggcgtagctggtgttttgggccgccatggcggcggcatacccctccttgagcggaatggccccctccgcgcccgtggagagcacggccgccgtccgcgcggcggcctccacccccagcccggacgcgcccatcccccgcagatagtccgccgccgcccgctcccggggctccaggcagagcgagtgaaacaggtcgggcagggagtcgaagttgaggggctttatgagatagtagctggccccaagctgaaaggccagccggatgactgtgggctccgaggcctgggaggccaccaccacagccgggcgcgcgctccggcggcgcagggcgcggaggaaatcaagcccgtccatcccgggcagaatcagatccagcagcacgatatcgggcctggtctgctccaccagctccagcccctccaggccgtcctttgccagcgcgcataggcagacccccttccgtccggacagaagggcctccgtcagcatccgggtctccggatcatcctccaccaccaggacccggatctccagcgccacgcctactcctccgggcccagctcctgggcggcccggaacgccagatgcagcatgtgaacggccatatcccgctgcaccggagagagctggcgcaggtggcagagcaggtgctccagcacgggctcctccttctgcgcgccgtgggcgagctcatccagccctgtgtggaacacctcgcccagctccacaaaaatcgccatggacatacactttttcccctgttcaatatcatttacatattgggaggagatgcccaggcgctcggccagctcctccttgctcatccgcgccagcttccggctgtggtacacccgctcgcccaccgccttttgcagcgccagctttttctccttgtcctccattgtgtctcaccctttgtcccaaactttagatatagattgacacaactttggatttttactataaacaatagaatctttcttttaaactatagttttttaatcaaaaaccccgccggatcggcggggtttttgcctgtgcttattgcgctccgctcccggtggcatccggtgcgggctctgtgctctgtgccggggtcccggtctcaggcgcgggactggcggtcgcctgagcggcctcctcggcggccttttcctcctgccactgctcggcaaaggccaccatattcttgtagaaggaattgggatccagcttctcataggcgggcttgacctctaccttcgcctcctccacccactgctcgttcagcttgctcatggcgtaatcggggtagatggccgccatgctgtcccggagctgctggcgctcctcgtcggtaaagtcctggcgcagaatgatgtggtagccgtaggcggtttccacgggctcgctgatctcacccacggccagggccttggcggcactctcaaactgaggcaccatctggccggcataggccaggtagccgtcgggcgcatagagctggttgttctcgtcccggccgtcgtcgctgcgttcgttcatcaccttgtcaaactccaccaaggggtctgcggcggtccgaatctgggccaggagctggtcggcctccgccttgacggcggccttctgctcgtcggtgacggcgctgccgtcctcgttctccgggaaggccagcaggatgtgcttggccttgtagtagcccgcctcctccaccatggcatccagatcggcgtcctgggcggtcagctcccccgcctcctccatctgggtctggaggctccgggccagatagggcacctggttcagcttgcggaaagccgcctcgctgatgcactgctggtccaggtactcctgaagggtcatcccgtaatagctgtccacccgctgggtcagcgtctccagctcagcgtccgcctcggcctgctcctcctcggtcacggtcagtcccgccgccgccgcgtggttggacaccgtggtgtagagcacgctggtgttccgcgcgtcctccttcagatactccgccgtggggacgccgttgagctcctcctcccaagcgtcgtcgtccgccaggtaaccgctctgcttggccgaggccacgctctggagcagccagaacaggtactcgtcggcggtaacctctgtgccgtccaccgtaaagagcaccgtgtccctggtcacaccggcggtctgataggccacgtcggacgggtccacctccggcgcgccgggcgcgcaggctgtcagtccggccacgagcagcgccccggtcatgccggcgcacagaaactgtttcacgttcatgcgtgtttgtcctccttatttgggttccaaaagcctgttccagtgtacaccatttccccagcggatacaaccggaagttttgcgcgccgccctacggctccgctttgggggcgttttcggcatagtcctccaccagcttgcgcccgaatttcagggcgtcctcagccccagcccgccagcagcgggccgggggccccgttccatttcatttcgctgggcggaagtgaatcccgcccagctccgccgcacacgcggcgccggctgccgccgggtagggggagtccgcccccgcgccctacccctctgtctgagccggggcggtcttggcgtagtcctccaccagcttgcggccgaatttcagggcgtcctccccctttttgagccgcagggccagatagggccgctccccggcggagaagagcaggcgggagcggtacttctccaggccgcacagggcggacacccgctggagatcgaactggtccagatagaaattcaggttggcgcccttctggtcgatctgggaaatcccgttccgggcggcgtcggcgcggaggagagccacggagatgaggttgttgaccgtgcggggcgggtcgccgtagcggtcgataagctcatccatcacgtcgtcggcgtccgcctcggagcggatggcggcgatgcggcggtagaggtccatccgctgctccggcgagggcacatagcggtctgggatggaggcggccacactgagatcggcggcgcactcggtggggcgctccggcttctcgccccgctcctccagtaccgcctcctccagcagcttgaggtacatgtcgtagcccacgctgagcaggaatccgctctgctccggccccagcacattgcccgccccccggatctccaggtcgcgcatggcgattttgaagccggagccgaactcggcaaactcccggatggcccccaggcgcttggaggccacctcggtgagcactttgccccggcggtaggtcaggtaggcataagccctgcgcgtggagcggcctacccggccgcggatctggtggagctgggccaggcccatgtggtcggcgtcctcaatgatcagggtgttggcgttggcgatgtcgatgcccgtttcgatgatggtggtgcacaccagcacgtccacctcgccgtcgctcatgcgggtcatcacgtcgttgagctcctcctggctcatcttgccgtgggccaccgccacggccgcgtcctcccccagcatctccttgatgcgggcggcggtgcgggtgatggtctccacccggttgtggaggtagtacacctggccgccccgctccagctcccggcgcatggcgtcggagagcaccccccagtcgtgctccagcacataggtctgcaccggctggcggtccatgggcggctcctccagggtggacatgtcccggatgccggagagggccatattcagcgtccgggggatgggggtggcggagagggtgagcacgtccacctgcttggacagctccttgagcttctccttgtgctggacgccgaagcgctgctcctcgtcaatgaccagcaggcccaaatccttaaatttcacgtccttctgaaagagccggtgggtgccgatgagcagatcgatgcccccctgctccagccgccgcagggtgtccttcatctgggcctgggtgcggaagcggctgaccacgtcgatctccaccgggtacttggcaaagcgctgcttagccgtcaggtagtgctgccgggccagcacggtggtgggcaccaggatggcggcctgtttgccgtccagcacacacttcatgatggcccggaaggccacctccgtcttgccgtagcccacgtcgccgcacagcagccggtccatgggccgggcctgctccatatcctgcttgatctcggcgatgcagcggagctgatcgtcggtttcggcgtactcgaactcgtcctcaaactccttcatccagggggaatcgggggagaaggcgaagccgggctggcgctgccgctcggcatagagctgaatgagccccttggccagatccttgacggccttcttggcccgggtcttggccttctcccagtcggtgccccccagcctggagagcttgcgggtctcctgggcgtcctccccggagccgatgtacttgctcaccaggtcgagctgggtggcggggacgtagagcacgtcggccccggcgtaggcgatcttgacgtagtccttctgcaccccgtccaccgtcatcttggtcatctccaggaagcggcccacgccgtggtgctcgtgtaccaccaggtcgccgggagacaggtcggcgtaggagcccagcttctgccggttggtcaccggcttgctcctgcgctttttgcccagcagggactgcccctcggtgagcacggcgaagcgccccaccgggtactccatgccggcggtgagcccccccacggcaatcaccgccttgccgtagccgggcagctcgtggagctggaaatccacggcggtggtcatcttctgctcccgcaggagggcctggaggttgagggcacgctgctcgctgctcaccagcaccacggtgcggaatccgtcggagacatagtgggccaggtcggagacggcggtctccaggctggcgccgtaagaggggagctgcttggtcagcaggttgagcagggtgcggggccgctgggggtaccgggaggaggtgaaggcgtccaggtaacagaccggccagtcggccaacacctcggtcagctcctcaaaggtgcgggcgaagtcagccagctccccggccagctctccccgctccatcagggccttggcgtcctctcccaactgccacaggtagctctttccccgctcggccacccgggggctctcgctgagcaccaccaccgcgtcctcggggaagtaatccgccgccgtggccatgacggggtagatcagggcgatgtagcggtccatggccgggaaggccgtgctggccgccagccgctcccggtcctcctccagcgtctgcaccagtgtctcgctccccttgcggcgctttgcctgggaaatgagacggtccagcccctccagcagcccgccgtacccgccaggggtaaactggggcagcacctccgccgccggcaggatctccgccgcgccgaggttctcgatgcgccgctgggtgtcgggatcgaagaggcccatggcgtcgatttcgtccccgaagaactccacccggacgggcttggggtgggccggggagaaaaagtccaggatgcccccccgcagggcgaactggcccacgccctccacctgctcgcagcgggtgtagcccgcggcggccagggtgccggccagctcccccaggtcgtgccgctctcccatccgcagaacctgggccgcctgggtcagcagggttttgggaatggtgcgctggagaatggactccaccgtacacaccagcagggggcactcccccgccgccagcgcccgcagggtggacagccgccggtgctcgtactgccgggacaccaccgcggcgttgtggaaggtgaactcccgggcagagagtgtgcgcaccgcctcccccgacagggcggccagatccctggccatgcgctcggcctccccctcgtcggcgcacaccaccaccacggggcggttcagctcctggcggatgcccgcggcgaagtgggcgcggtgcaccgccgacagcccggaaaaggccgccggacaggccccgttgtcgatggccgccagcagggagcggtattcaggtatgtcgttgagggcggagagcagtggcttcataggacacctcggcacagaaaagatcggaagttgtgggcgcgggccgttcggaggcccggcgtgggatgggcggcggggagtctcagaggcaaatcttcatccgccgctcccggtagaccaccccgtcaaaggtatactggatctcccggacggcgcggaagcccagcttttgatacatctcatgggccgccgtattctccagctccacatggaggtagagctcccgcacccccatgtgttccctcataaagtccagaaagcggagcacggcctctttgcccaggccccgcccctggtactgcgcgccgatcatgaaccgactcatgcaccaccctggaagctcggggtcataatcaaacaggacaaatccgaccatgacgccgtcggaatagacggcacgggtatacaggccctcttcaaaccgggcctcggccagggagcgggcgttatccgccacaaagccgcgctgctcgtccttcacctttaggcagatgcattccatatagttgcttttatcaatttcccgaaaggtgatcatggcgcactcctcagccgttgaagcggttcatggccttgtccggcccctcctgaataaggcactccaccgcgtcggcggccttacggatggcctctgtgatggtcttgagatcctccccggcgaatttggagagcacccagtcggccatgtcatagtctgggtggggcttctggcccaccccgaccttgatccgggggaactggtcggtacccaggtgctggatgatgctcttgaggccgttatgacccccggcggagccgcccttgcggatgcgcagcttgcccacggggagggacacgtcgtcagagatgaccagcacccgctccggtgggagtttatagaagcgggcggcctcccccaccgcctcgccggacaggttcatataggtcaccggcttcataagcagcaccttgacgccccccacctccaaggtgttggtaagggcgcggtgcttcagcttctgcacgggcacccgggcccgctcggccagctcgtccacggtgagaaagccgacattgtggcgggtattctcatatttttcgccggggttgcccaggcccaccaccagccattcagccccggcgccccgatttttgtcaaaaaacaaggtttttcctccatgcggcaatgggggcggagcaacgctccgccccccgccatatttgtactatcctgtccgtcttatacaaagagtttcgagacagacacttcctcgtagatgcgctcgatggcctcggcaaacatgtgggccacggagagatacttgatcttgtcgcaggcgacgccagccttggggggcacggtatccaggaagtagacctccttgaggacactcttctcaatgcgctccacggcggggccggagagcacgccgtggctggcgcaggcgatgacgtccaccgcgccgcccagctccaccagggcctgggccgcgccgcagagggagccggcggtgtccaccatgtcgtcgaagaggatgaccttcttgccccggacgtcgccgatgatgttcatgacctcggaggagttggccttctggcggcgcttgtccacgatggccaggcccatgcccagcttctgggcgaaggcgcgggcgcgggccacgctgcccacgtcgggggagacgacgatcacctcgtcctccctgccgttaaagcggtcgtggagatagttggtgaaaatggggttgcccagcagattgtccacggggatgtcaaagaagccctgaatctggttggcgtggagatccatggtgaggacccggtcggcgccggcgcgggtgatcaggttggccaccagcttggcggagatggggtcgcggggcttggtcttgcggtcctggcgggcgtagccgaagtagggcatcacggcggtgatgcggccggcggaggcccgcttgagggcatcgatcatgatgagcagctccatgaggttgtcgttgaccggggagctggtggactggaccacgaacacgtcggagccgcggacggtctcatagatggagacaaagttctccccatcagagaaggcgcccacctcggcgttgcccagctccgtgcccacctccttgcagatggcctcggccagggggcggttggaagtgccggaaaagatcttgatgtccttaccgtgtgcgatcattcttgtaacatcctctcacattttttctctatcctgtatcccgcggctgcgggaaagagctactttctgcggttgcgccgcttggcggcccactgcttcttgacggtctggcgggtgcgggcgatggccagggagtcggcgggcacctcgtcggtgatggtgctgcccgcagcggtgtacgccccctcccccacccgcacgggggccaccaggttggtattgcagccgatgaacgcatggtcgccgatgaccgtgcggaacttgctggtgccgtcatagttcaccgtgacggtgccgcagccgaaattgacgtggccgcccacgtcggagtcgcccacgtacgtcaggtgggagatcttggtaccctcgccgatggtggagtttttcagctccacaaagtcgcccaccttgacgccgggccccacgtggcagttggggcggatgtacgcgaaggggccgatcttcaccccgtcgccgatggtgctctcattgagctgggaggagttaatggtgacgccgtcccccacggtgcagtcccgcaccatggcgttcggacccacctcgcagtcccggccgatgacggtctccccccgcaggattgtgccgggcagcaggacggtgccctcccccaccttcacccggggacccacatagcaatggctggggtccataatgcggactccggcttccagcaggcggcgcacaccgtgctgccgggccaccatctcagcctccatgcggccgttccagccggagcggatgggataggcgccctggaaccagacgccgcggctgttgaagcggtcgcccttctccttcagggcctcctccaggccaacgccctcagccagagtctgggacagcaggccgccgtcgatgcggtacacgccggtgtccttgctgtcgagtacgccgccgttctccaggccggccagcgtccgggcatccccccagtccagcagcaccggcttggtgatcacgatcaccttgccctccagggcgttgagaaaagccgacagctgctccactgcgtcgccgctgccgccggtgacaaactcggtgccggcggggaagcaggccgccgcccgggcctggtcgtcggtgtggcagaccacgaaaaaccgctccactccggcggccctgagcgactccgccagccacagggccgcgggatcgaagaggagctcctccagcatcagggacgggccgttgccctcccgtggcaggaatacgaccgctccagtcgcgttcatgttgaaatcacctcaaaaacatggatttcttgcaatcagattatagcaaagcaggactgaaaatgcatcggaaatttcaaaaaaagcgggtaatttttcgctcttgggaggcttgcacaatttcccgcccctttttccgttcctttctttgcaaaacggcccctcgccgtccccatttaaaaaacaaaagcaagcctgtcagagacaggcttgctcacgcgccgctcaaaaccgcccggcgcaggcccaggttccgccagatctgcatgatttcagccgtggcgcacagcttgtcggccaggcagaccgcggccgcctcgcggctgcggggcgcccggcgggacaggggccacatgtgggccaaaatgcagtttttctcccgggcggtcaggccgccgcacagcgcggccgcattctccgcggcggccaccggatgggcaaagcactgccggtaggagggcagggtgcgggggtcgtagagatacaggtcgtggagcagccccgcccgcgcagcggtgcgcgcgtcggccccccaccggtccgccagataccaggccacataggacacaaagacactgtgctcatagcaggacacgccggggtggtgccggatggacttcatatgctgcacctgagacgaaaacagcagctcctccacacaggcacggtactccatccaggccctctggttcatgggtgtcacccgctttctcttgataaggtggttctattatacgcctatcccgccctgttgtcactggaaatttggcggattctgccccgggactgcgggctgttttaaaaaaacgtcagaaataattaaaaactttccctccggcggcgtgtatactaagtgtactatttcatgtaatacagtttccggaagggagacgacggtatgatccaactcaattaccgggatgcgcggcccatctacgagcaggtcagggacggcctgcgccatctggtggtgaccggggcgctccaggcgggagacaaactgccctccgtgcgggcgctggcctcctcgctggccatcaaccccaacaccatccagcgggcctatgagtccctggagcaggagggctatctctacacggtggcgggcaagggctccttcgccgccccccaggccgacgtgaatgcagccagaagggaccgcctgctccgggaatttgacgcctcggcggcggagcttctgttcctgggcatgaccgcgggggagctggccgggcggctggaggcggcggcccggcagactgtgagagaggagcgcagctatgattgaagcaaaaaatgtggttaagagctttgacgggttccgggccctggacggactgaccatgacggtgccccacgggtccatctacgggcttgtgggccccaacggcgcaggcaagtccaccctgctgcgccacgtcaccggcgtctaccggcaggacagcggctcggtgctcattgagggcaacccggtgtacgaaaacccggcggccaagtcccgcatcgcctccatccccgacgagctttactatttcctctccgcctccacccgggacatgatgcgcttttaccggggcttctatccccggttcgacgtcaagcgctacgaggccctgaaggacgtgtttaccaccattccggaaaagcagcccatccggcggctctccaagggcatgcagaagcagtccgccttctggctggccctgtgctgccggccggacatcctggtgctggacgagccggtggacggcctggacccggtgatgcggcggcaggtgtggtccctgctgatgggagacgtggccgaccacggcaccacagtgctggtatcctcccacaacctgcgggagctggaggacgtgtgcgaccatgtgggcattctctccagggggaaggtgctcattgagcggagcctgagcgccctgcaggagaacgtggtcaagatgcaggtggtgttccaggagaaggaattgccccagcttcccggggacctccaggtgctccacgtctcccaggtggggcgcatccacaccctcatcatccggggcaacgccaccgagatcaccaaccgtctggccgccttcgcccccattctgatggaggcgctgcccctgaccctggaggagatctttatctatgagctgggaggtgaggactatgcggtccgcgacatcgtactttaattttaccctgctgcgcaagaatttcgcccgcttctggcccatctggtcgctgtacggcctgttctggctggcggtgctgcccctcaatattctgtccaaccggatacattgggacgggggaatggcccgcagcctgcccctgaactacctggacggcggcccgagcgccgccgttgcgctgaccgctctgttcggcctgctgtgcgccatggcggtgttctcctacctctatgccagccgctcggtgggcatgcttcacgccctgcccctgcggcgggagggcctgttcctcaccaactacctgtcggggcttctgttcctgctgctgcccaatctggcggtgttcctgctggccctggcggcggaggtctttgccggcacagtggtgttcagcagcctgttcacctggctggtggtggtgagcctgttcgggctcttcttctactcctttgccgtgttctgcgccatgttcaccggccacgtgctggccctgcccgccttctatgtggttctcaatggcctggccgccgggctgtgctgggtcttcagccgtatggccgaggaatttctcttcggcttcaccagcgctgcctggctggagaagctgggcgtctggctcaccccggtgctgctgctctccgaggcctgtcacgtccagtatgataccataacggacgccgccggaaacagcatgctgggcgatccctactttgccggtctgggctatgcctccctgtacgccctcatcgggctggtgctggcagggctggccctggcggcctaccgccgccggcatttggagagcgccggcgacgtggtcagcgtccgctgggtgcgcccggtgttcaaatacggtgtggccttctgcaccgctgtgacactgagcactgtcttttactacgttttggaccctctgctgccccgcgggccgtggacgctcctggttctcatggtggtgtggggcgcggcgggctgctttgtggccgagatgctgctgtgcaagagcttctgggtattccggggcgcgtggaagggctgcgtggtctttctgtgctgcctgacggccgccatgtgcgcgatggagttcgatataaccggctttgagggccgggtgcccgacgccgctgaggtacagagcgcccacctgtccggcatggagtccgccccctatgacgacctgggctacgccaccctcaccttggacaccccggaggagctggaagcccttaccggcctgcaccagtccattgtagcgcacaaggaggagctggaggaagcggactgggagagcacctggtcagaggacggcagcggcctgagcatccagtccgacggctggacctatgtggacatttcctataccctcatggacggctcctatctgacccggaaataccgggttcccctcagccagtccgagctggacacgccgggcacccccgccgcccggctggacgccctgctcaacgcccccggcctggctggtgaatcttacttccacgcgcagcaggagggagaccggctggtggacgcctggctcaccaaccccgatacggacagcgcgattgtccccgcctccgccctgaccggactggaggaggccgtccgcgccgatctggccgagggtaccctgggccgccgctatttgctggagaaccgggaccggctggaaaactgctactacaacgatctatacctggagttccggcccgccggacgcaccggcggcgaggaggaggacggctacacggtctgcatcaccctccagtccggggcccggcacaccctggccgtactccaggcctgcggtctggacggcacgctggtcacccaggcccagattcagaaggaggacgccgtctacgcccaatccacaacggggcgcggctgagacaggccgggcggttcggcaaaacccgaaccgcccggttttgtttttttaaaaaacctgcccttaccaatttaccagtggttgattttttaaaaacggaggggtataatcaaacccgaagggtatttttcggtatggggagaaaatgaaattacgatctggaggtttactgcaatgaaagaagtgtatgtggtcaactgctgccggacggcagtgggctccttcgggggcagcctgaaggacacccccgcaacggagctgggtgccgtagtggtgaaggaggcgctgaaccgcgccggagtgaagccggagcaggtggacgagctgatgttcggctgcgtgctcaccgccgccctgggccagaaccccgcccgccaggtgggcgtgaaggcgggcctgccctactccgtgcccgcctacaccgtgggcatggtttgcggctccggcatgaagagcgtcatcgagggcgcccgcgccatcctgtgcggcgacgccgacatcatcgtggccggcggcaccgagaacatgtccgccgccccttacgccctccccgccgagcgctggggcgcccgcatgggcgacaagaaggtcgtggacaccatgatcaaggacggcctgtgggacgcctacaacaactaccacatgggcaccactgcggagaacatctgcgacgtgtggggcatcacccgcgaggagctggatgccttcggcgccgcctcccagcagaagaccgaggcggcccagaaggccggacggtttgacgacgagatcgtgcccgtcatggtcaagaagaagaaggaaatggtggagttcaaggtggacgagttcccccgcgccggcaccactgtggagagcctgggcaagctgaagggcgccttccccgtgggtccggagggcgtggaggacgagattgtccacacctttgagcccacccaggttcacgcggatgacgcccacaagcatgtgcagcgggtgactgcgggccaggccagcggcatcaacgacggcgcggccgccattgttctggcctccaaggaggctgtggagaagtacggcctcaagcccatggccaagctggtgagctggggccacggcggcgtggatcccaagatcatgggtgtcggccccgtgcccgccagccgtcaggccatgagcaaggcgggccttaagatcgaggacattgatctggtggaggccaacgaggcctttgccgcccagtccatcgccgtggcccgcgagctgggcttcgacatggagaaggtcaatgtcaacggcggcgccatcgccatcggccaccctgtcggctgctccggcgcccgcatcatcgtcaccctgctccatgagatggccaaacggcccgatgccaagaagggcctggccaccctgtgcatcggcggcggcatgggtgttgccaccatcttcgaaaagtgctaaactaagcgggaggaagggcggcggaccgtccttcctcccaactatcacgcgaacaccccactctaatttgaactaggagggtaacactgtgcgcaataagattatttctgttgcggaggccgtggacatgatccccgacggggcgaccatcatgtacggcggcttcctgggctgcggcagcgcccatcacatcatcgaagctctggctcagaagggcaccaaggacctgaccatcatcggcaacgactgcggcatggccaccggccccaacggcgaggaattctacggcgtggccaagctggtgcacaaccatcaggtcaagcacgtcatcgccacccacgtgggcatgacccccgacgtgggcactcagggcatggtggacaagaccctgaccgtggatctgattccccagggcactctggcggagatgatccgcgccggcggcgccggcctgggcggcgtgctcacccccaccggcgtgggcaccatcgtggaggattcccccttctgcctgggcaagcagaccattgacggcagagactatctgctcatgaagcccatccgtgccgatttcgccctcatcaacggctatcttgtggacaagttcggcaacatctggtacaagggcacgacccgcaacttcaacatcgtcatggccaccgccgccgacgtggtgatcgccgaggcggacaatgtggtggagatcggcgacatccagcctgagaacgtcgtgacctccggcgcctttgtcaactacatcgtggatggagggaatgcgtaatggaaaagtctgagatcaagggctttattgccaagcgcgtcgcccaggagctgaaggacggcgacgtggtcaacctgggcatcggcctgcccaccctggtacccgcctacctgcctgagggggtgcatgtgattctccagtccgagaacggcatcatcggcaccggagccaagcccacgcccgaggaggccgacccccgctataagaccgacgccggcggacagcccgcccaggccgctcccttcggctgctacatcgactccgccacctccttcggctttatccgcggcggccatgtaaacgccaccattctgggcggcctggaggtagacgaggagggctccttgtccaactggattatccccggcaagaagatgcccggtatgggcggcgccatggatctgctggtgggcgccaaggaagtcatcgtcgccatggagcacaccgccaagggcaaccccaagatcctgaagaagtgcaggctgccctacaccgccgtccactgtatcaccaagatcatcaccgagatgtgcgtcatcaacgtgaccgacaagggcctggagctggtggagatcaaccccgagttcactgtggagcaggtacaggccgccaccgaggccaccctgatcgtctcccccgacctgaagcccatgtgctgattgtcaaaaagacctgcggcaaatgccgcaggtctttttttcgtccgggcggggcgatgcgggtaccgcccccctaccgcctgtgatccagccccagcagataatccacacttaccccataataccgggccagagcaatcagcgtctggctgggaatatccaaacgcccggtctcataccgggaataggtggcctgactgaccctcaatatctttgccatttccgcctgggacagatcatgatcctcccgcagttccgccaatcgcgggtacataagcatcaccggtaatcagcatatatcatgcaaaaactgcatattgcattttatgcactttttgcataaaatagtcttaggtgataaggatgtataaatatggaattgtagacggacaggtatgcgggacttgcgtccactaccggcagcactatatttaccgggatggcagctatttccccctttggtacgggcactgtcattgtccacggcgcaagaaccgaaccccggaccaggtatgcacgtattgggagccaattccgcacggcccgtaggggccgatgccctcatcggcccacaaaacgggagacgcccgacaggcgtctcccgtttgtctttattccccttttcccacgaacctgtgggcctcgtccaccgcccgctccacggcgttcagaatattctggtagccggtgcagcggcacaggtggccggagatgagcttgcgcagctcctcccgggtgtactgcttgccggagcccacgatctccacggcggacatgatgatgccgggggtgcagaagccgcactggacggcggcctcctccacaaaggcccgctggatgggggacaggcccccgtccggctcctggaggccctccacggtgaggatgctcttaccctgggcccacacgcccaggtagatgcaggagtcgatggccgtgccgtccaccaggacggtgcaggccccgcactcccccacctcacagcccttcttcacgctggtgaggcccagccgctcccgcagcacgtcggccagggactcccgggggtcgatacccacctccacgggcttgttgttcacggtacagcgcagcacttcgatcatacgtcggcccctcccttccgggccgcctcccgcagggagcgggcggacagctccttgaccagctggatgcggaactccttggacgcccgccagctcgtgcgggggttcacgtcggccagggcggcctcgccgatggcggcgacggcctccccgatgggcaggccccgcaccgccgcctcggcggccggagagcgcatgggcaccggcccggccacgccaaaggccagggccgcgtcgtccaccatttttttgtcgctggtgagcttcaccaggcagctcacccccagggtggcgatgtccatggcgttgcgctgggcatatttgatgtagtggccggtatagccgacatagttgtcgtatgggatgacgattttcaccagcagctcatagggggccagggccaccttgcccaccccctggtaccactgggagatgggcacctcccgctcgcccttggggccgcgcacccgcagcaccgcgtccagggccaccagggtggaggccgtgtcggcggaggtaatgccgttgcacacgttgccgccgatggtgcctgcggcccggagctggggtccgccggccatgtcggccgcctcccccagcacggggattgtgcggcggatcacgtcggaaaaggtgacgccgcggaaggtggtcagggggccgatctccacgtcgccgttgtcagccagcgtcacgccggagagctcctctcccagctcgtggatggacaccagggagcagcccgccagcttcccctcccggatcttgatgagcacgtcggtgccgccggcgatcaccacggcggcgggatcggcctggagggcgcggatggcgtcgtccaccgacctggccgaatagatggatgcaatgtcatacatgtcagatcagccctcctctcgtaaattcctccaccagcttctggggcgacaggggcagggtgtttaccgccacgccggtggcctggagcaccgcattgcggatggccggggccacggggatggtgggcggctcgcccagagccttgtttccaaaggggccggagggatcgtcggtctccacgaacagggcggtgagctccgggtggtccatagaggtgggcatcttgtagtccagcaggttgccgttgagcagccggccggtcttggggtcgaacttcatctcctcggtgagggcgtagccgatgcccatgctcatgccgccgtggacctgggcctccgccagggcggggttgatgagcttccccgagtcgtggacgttgacgatgcgcagcaccctcaccttgcccacgggtatgtccacctccacctcggcaaagcagcagccgaaggcgaaggtgttctccttgcagtggttggtgtcctcggcggtgatgtggacgctgtgctccagggagtagaaggcgttcatggccaggtcggccagggagatgagggcctcccccgccccgtccacaacctgccgctcccggatgtccagtcccgatgcgtcgggaaatagctcggcggcgtaggcgaggagcttttctcggaactcctcccccacctttttgatggccttgccggtgacgtaggtctgccgggaggcgtaggccccagtatcaaagggggctgtgtcggtgtcctggaaggagacaatatgtacgtcctcggtgggaatgccgatggcctgggcggccatctgggagaacacggtgtcgcccccctggccgatctcggtggcccccaggtggagctgcaccgtgccgtcctggttgagcaccagccgggcggaggcggtctccagggagatggggtacacgccggtcttgtaggagaaacaggccatgcccacgccccggcgcaccgggccgctctgctccttgtacttctcccgcagctccacccagccgatgaagtccgcgcccttctcgatgcactcggccaggccggtggagtggcaggtgatgccgttgaaggggtcgacgtagcccaggggcatgaggttcgccagccggaaggccttggggtcccagcccctttcccgggcaatgtcgtccatcatgcactccacggcgaaattgcactgggggatgccgtagccccgcatcgcgccgggggcgggccggttggtgtagacggtgtaggccgtggagtggtggccgatccggtccagatagagctgccggaagccggtgacggcgttggccacgatggagtggccgtgggaggcgtagcccccctggttggagacggcggtgcaggagcgggccatcaggcgcatgtcgccgtccaccgccgccgccacgtcgaaggagatggggtggcgggagcgggtgttctggaaggtctcctcccgggacacgtccagccggacgcaccggccccccacctgggtggtgagccaggcgttgaggggctcgtagagcacctcctgcttgttgccgaagccgccgccgatgtagggcttgatcacccggatggagccccagccgatgcccatggcctggccgatcacccggcggacgatgtgggggatctgggtggaggtgaccaccacgatgcgccccccctccatccaggcgtaggagatggggttctcgatgtggcagtgctgcacctgctgggtgtcgtagcgcccccggaactggtaataggcggggcaggccagcacgtcctccacgctgtggaagtccgactccggcatgggcgtgcggagatccattttggccaggacgttgtccgggtgctcctcgtggagcaccggcgcgccctccgccatggcctgctccgcctccagcaccacggggtactcctcgtactccacccggatgagctccagggcccgccgggcggtgatctcgtcctccgccaccacggcggcgatgtcgtcgccgtagatgcgcacgcggcggttgagcagcttgcggtcggacacgtcctggtgggccttctccacgctccaggggtggccgggggtggggtactggatgtccggcacgtcaaagcaggtcagcaccttcaccaccccgggcagggcctgggcggcggagatgtccatggacttgacccagccgttggcaatggtgctgtggagaatcttcgcctccagcaccggacgggggcagagatcgtcggtatatttggcgcggccggtcaccttgtcggcggcgtccacgcgggggatgctcctcccgacttccataaaacgcacctccttctgtttatgcctccagtataccgcaccgggcaggaaaaggaaagcccgatctttccccgcgccgcattccactaaatcaggccccatacccttattttttgcggcacccagccgaattaagagtagggttattttcctgtttctcaatagttatgtgttgctgcctggcacaggagtccaaggcgtttccccgatcaacaaggaaaagagtgatatggcttgtataggattgcagtttgtgacgacaacccggaaattcttacccaggtctgtaccacgctgagcggttcccccctgggaaaggaactggagctgacccccttccattccggtgcggcgctggctgccgccctgcggagtggagcccggtttgcgctgcttatcctggacatcgaactggataccgtggacggcgttgccattgggcgcctgctgcgggaagagctgcgggattctgtgacacagcttttgtatatctccggccagcagcagtacgctatggctctgtttgatacccggccgctcaattttttgctcaagcccctagacgaggcaaagctgctggattgtgtggttcaggccatccgcctgtcccgtcccgaagaggccgtgcttaccgttttagtggagcggacgccccgcgccctgccgacccaggccatacgctatattgaaagttaccataagcggatcaccgttcattccgtccagcatgaactggtgtgccgtgacaagctggacactgtggcccgccagctcccggagcagttttttctgcgtattcaccagtccttcctggtcaacaccctgtatgtccgccgcatccaatatgatcggctcactctggacgacggaacagagctgcccatcagccagtcctaccggcgggtggtgcgggggcgcctgctgagatggactcccggggggatggtgctatgaccgacctgcaaaccgcctcctacctgctcattaacgggtttcactggtacctctacggccgcctgctgaccctctttttgggccagcgcagggtgggatgcccggcagaggcggcaggctacctgtgtgcctatgtactcaacagcctgtgctttctgttggtcggcgtccccctgctgaacctggcctcctccctgctccccctgctgctgctctccctgctctaccgtgctccgcattggcaaaggctgtggtctgcgctggtcatctacgccgccagctttctgctggatacattggtctttctgctaatgcctgcccatacctcccagcttggaaacctggtatccgccctgctcctgttttttatggccctggtgttggaaaagcgttgtccctcttccgaaaaagagcttcagccggacggccccttctactggttcgccgtacttctgattccctctacctccattgccatggtcatacttttgttttactttgcccactgccctgcctggctgtccctgcttgtggatgggatgctcattcttctcaacctcctggtattccatctctaccggcaggtgggacgcagctattacgcgcagtaccgcgcccgtatactggagcagcagaatcaggcctatgccaacgaagtagccctttaccaatgcggggaacgggagctccgcaccctgcggcacgatatgcgcaaccacttggccgccctacatttgttggccggccagcaggacaccggagcactgcagggttacctggaacagttttcgaaatgtttagagccctcggccctctgggccagcagcggcaatcccgaactggacagcctgatcaacttcaagttagccgaggcccggcgggcaggggcgcaggtgcgggcagagctccgcctccccgcagggctttcccttcccctctttaccgtcaacactatcttgggtaatctcctggataacgcggtggagggactggcccgttgcccccaaaaggagctgtccctcgccctgtgggcggacaggggcctgtgccgcctccgtgtggagaacacctttgacggcacgcttttgcaggatcacgagggcaactttaaaacgagaaaggcaggaacctccctgcatggtatggggctggacagtgtacgccgggccctgtcctctctggacggctttttacaggtacggattgagggccgccgcttcattgccgaggccatctggtatctgcccgagcacccccaaacgacggatattacctcttaaacgacggaatcggcaaactgggtagacggtaccctatgtctacgctataatagcaccactgtttgcagaaaggtgctattaccatgaaaacctaccatatcactttacaaggccaggactacaccatctgtttacgatcctactccgtggaaatcaacggaacgcgctacaaaatccgctctcttccggcgcggaagctgctgtttctgaccatggaggtggatctcccaatttccggcgcccatgtgatgctggtgtccggcctgtggtccatggagctggtggtggacggcgtgatgctgcgcaccggcaagccctacacccccatcggcaaaatcccggtgtgggcttatgtggtgtctgcccttaacctggcgcagattatgaacggcgctgttggcggagtgctggccgtgctcggcattttcctgacccttcggctgtccacctccgagaatctggcccccgcgctccgggtcctgttgagtattgcctatctggtggtctcctgggccgcagtctttgcccttgcctttcttctggtgagcagtggaacaatttactattaatacaaagcagaaacagaaaggagtttgttttgatgcacgagcatcctaattcccttttaaaagtaggctgccttctgtttattgtgggcggccttgcctccgcccttgtcacgctggccggactccttctctcagtggggagcatgatggattccgaactgtatccctatgtcgatcaaatggcccgggcacagagcgacggcctgatcggcggcgacgagataatggctgttttctccggatttgtttttgtaatgggcgcgattgccgtaatcatgctgatcattgatctgacggttggtattctggggctctcccggagccggcggccagaaaaataccgctttttcctgggttggggaatcccactgctggtcatcggcggtattggcaccctgctgaccggggtggttacccccaacggtgttgcttccctggtctgcggcgttgcagcccccattctgtttatcgttgggggcattcagcagaacaaagcctataacgaagcacacacacccacaccctgacgggatctatgtataccatacatatccataaaatccgtaccaaataactgagaggagcttataacatgaacaccgcaaagaaacgcattctttccctgaccctgaccatctgcctggccctgtccatgatgctcaccctgtccgcctgtggcaaaaagaacctggaggagtatttcaacaccgacaccatgcagaagcttgtcacctcttccgttgagcagtacgaatcccaggggatggagctcaaaatgtacgccgagggcgacgagctgcactacgacctcaccctgaccaccatcgagaccaccgatgacgaccgctccatgtatgccgaggctctggaggcaggactggccgaaaccgcccagaccttcgtggacgccgccaaggacgtgcagaagtccgtttccaatgagaccgtcctggtggtggtcacctattttgacgccgccggcgtggagctggcctcccagtccttctcctctgcggactgaacccggtacgcaccgagggagctgcacctgtgcagctccctttttcgctccaaaaaggggagctgacagccgtcagctccccttttgctcctctttttccccggatacgccgccgcccgacagacggttgtaatcggcaaacaggtctgctgttctctgaaggatacctctctgctcctgggtcagcctgcttacatcgagggtaacgctgcccatcccccgccgccccagcagcgaatcggtactcactccaagaatattcgcaatccggatcagaatatcataggagggcagccgcgtcccgttctcgtaggccgacacagaggctccggtcacccccagacggcaggcaaaatcggcctgggtcatcttcattgaggtccgatattccttgatccgctcccctaggtctttcatccatccaacctccgcccttagcctgctaccctattttatcgaatggcaaaaaacatttggttttattcttatctacaaggtgttgaatatatgcctctgctgtgttatactgtcagtagaattatttccttgtatgccgttctgtccccggatccccctccgccgcgtcttacccggttcaactcccccaaaatacacgtccccaccgcggcgtccgcctttggatgcctgccttcgggcactgtgcaggagatctgcattgccatatcatccgaatgagaggagaaaaccaaatgaaaaaacgcattctgtcccttgccatggccgcctgcctggccctgtccatgatgctcaccctgtccgcctgcggcaaaaagaacctggaggagtatttcaacaccgacaccatgcagaagcttgtcgcctcttccgttgagcagtacgaatcccaggggatggagctcaaaatgtacgccgagggcgatgagctgcactacgacctcaccctgaccaccatcgagaccaccgatgacgaccgctccgtgtatgccgaggctctggaggcaggactggccgaaaccgcccagaccttcgtggacgccgccaaggacgtgcagaagtccgtttccaatgagaccgtcctggtggtcgtcacctattttgacgccgccggcgtggagttggcctcccagtccttctcctccgcggactgatccctggtatagctcggggggcgctgcacagatgcagcgcccctcagcctgccgaaaaggtcttttcggcaggctgccggactttttgatttcacgtgaacggcccaggccggtctctcttggcctgcggccaattcaccttcagggaaccctgatggttcatctccgcaccaagtgccgccgcaaagcggcggttgcgctccgaatcgccctgcggggcagcctttcacactttccctccctccgacctcttaaccggagcgtttattgactgtctcaggaggggcgctgcatctgtgcagcgcccctcttctcttatgtccggcgcgaattgcgcttgatttctgcccgccttgtgctatcatgggagtatggcaattcggagtaaggaggcttttgcatgatcgacctgaccatccaccgccaagcactggaccgcaacatccaaaaggcccgggagggcggcgtcgtcatccccaccttcgagaacatgaagcacccggagacggtaccggagcccatccgggcccgcctgaggggcgtgggcctgtgggatgtggaccccctgaatctcttccgcatcacctggaagaacgagcccgtggagtccggcggactgtaccgcgccgtacccaactacatcgagctgcccccagccctcaccggcgtgcccgcccgcatcatcgccctggtgggcaagtggttccccaccggctgccacaaggtgggggcctccttcggctgtctggctccccggctggtcaccggacagttcgacgccgggtatcaccgggcggtgtggccctccaccggcaactactgccggggcggcgcgttcaactccaagctgctgggggtccggtcggtggccatcctcccggcgggcatgagccgggagcggttcgagtggctctcccagatcgccggagaggtgatcgccacccccggctgcgagtccaacgtcaaggagatcttcgacaagacccacgagctgcggcaggagcccgactgcatgatcttcaaccagtttgaggagatgggcaaccacctgtggcactatcaggtcaccggctccgccatcgccgaggtctttgaggcggtcaagcgccccggcgaccggctctccggggcctgcttcacctcaggcagcgcgggcaccatcggctgcggcgactacctcaaggaggtctaccccggcctgaagctggcggtgggcgaggcccttcagtgccccaccattctggaaaacggcttcggcgaccaccgcatcgagggcatcggcgacaaacacatcccctggatccacaatgtgaagaacaccgacatggtcatcgacatcgacgacgaggactcccagcggctgctgcggctgtttaacgacccggccggccatgactacctgcgggaggccggggtgccggaggagaccctgtcgcagctctccctgctgggtatctccggcatcgccaacgtgctgtgctgcgtgaagctgtccaagtactacgagctgacggagcacgacgtggtggccaccgtcctcaccgactcggcggacatgtaccgctcccgtatccgggagctggccgaccagtatggcccctatgacgggcgggccgccgcggtggaccacgccctccatctgctgggcctgcgcaccgacgccatggcggagctgaactactacgaccgcaagcgggtgcacaatctgaaatactacacttgggtggagcagcagggccgcgacatgcacgagctcaacgacctttggtacggcagtacctgggacgacgtgcaccggcaggccgccgccctggatgagctgatcaccgccttcaacgaggagaccggggtgctcaagcgcctgtaaaccggggcaggcggggcgatgagggcatcgccccctacagccgttaccctcataatgtgtaggggctgatgccctcatcggcccgccgtcccacatccgaaagggggattttatgaaatatgtcctgggcgccaagtgcgtcaaatgcgggcgggagtaccccgccgcgcccggtctgactacctgtgcctgtgggggcatcctggacatcgtatacgactacgccgccatccggcgggacttctcccccaaatctctggcggactgccgcgactacagcatgtggcggtaccggccccttctgccggtggaggaggcgtccgcccccccgcccctgcgggtgggctggtcccctctctataaggccgaccggctggcccgggccctggggctggataccctctacctcaaggacgacggccagaatcccacatcctccctcaaggaccgggcctccgccctggcggtggtcaaggcccgggaggcgggggcggacaccattgcctgctcctccaccggcaacgccgcctcatccctggcgggcaacgcggcggcggccgggctgtccacctacatctttgtgcccagccgcgcccccaggggcaaggtggcccagctgcggatcttcggcgccacggtcatcagcgtggagggctcctatgaggacacctttgagctgtccagggccgccatcgaccgctggggctggtacaaccgcaacgccgccatcaacccctacctctccgagggcaaaaagaccgtcaccctggagattctggagcagctcggctggcgcgtacccgattacatcgccctgtcggtgggggacggctgcaccatcgccggggcgtggaagggcctcaaggatctgtacgcggccgggtttatcgaccggctgccccggctcatctccgtgcaggcggagggctgctgccccctgaaccgggccatcgagacgggaaagccttgggaacccatggcggagaacaccctggccgactccatcgccgtgggggtgccccgcaacccggacaaggccctctgcgccatgcgggagtcggacggcgtggccgtgaacgtgtccgacggggagatcctggaggccatgcgcctgctgggccgcacccagggggtgtttggcgagcccgcgggggcggccggcaccgccggggtaaagaaggccgtggagctgggcctcattcccgccgggagcacggtggtgagcatcgtcaccggcaacggcctgaaggacgtgcagagcggtattcaggccgccggggagcccatgcgggtctctcctgacatggatgccctgcttgccgccttcgccgcccaggacatccggccctgaaaaccaacagagaaaggaaaccacactcatgaacgaccgctccgccaaaataggcgtctgggcctatctgctctttacgcttgccagctttgcgctggctctctatcttttgctggctgaggggggataccgctacaacgtctccctggtcgccctgcccgtctggatgggctataccgcctttaacaccattaagagcgtgtccgatctcatcggcgctcagaaccgaaccgccaacttcacccgtatgctggcccgctgggaggatacctttgagaaccgcggcaaagccctggccctgttcacctttatgaccctggtggtgggcctgatcaagctggctgtccccatcctcctgctccagttggggcaggcctttgcctgagcggctgggcgctgtcctcatggcctccggctttggacggcgctttggctccaacaaactgctggcagaggtggacggcgtcccgctctaccaccgggccatggcggctctggcccctgccgaatttgaccgggcagtggtgtgctccccctatcggcaaattctggctgctggtgaacgattcggatttcttccgctctataacggcggtgcggcggaggggatctccgcctccattcgcttgggcctagcccggatgtcggacctggacggggtgctctttgccgtctgcgaccagccatcgttgaccacaaagagtatcatccgcctcaaaaaatcctttttggaatcaccagacgccatttacgctctctcctggcaaggacggagaggcaatccggtggtgtttcccgccgacctgtttggagagctggccgcgcttaccggggacaccggcggcggcgcggtcatccgccgccacccggagcggctccggctggtggaggcgttttccccaaacgagcttttggatgtggataacccggaggcactcccctaaaaacaaacggatatcccaccggcaaatgagccggtgggatatccgttttgatatatttccgctgctactacaccggaatgtgctcccccagaaggagcaaatggtcgatctcctccacctccaccgggcgctccagctcccaggtgttgtaggcgtcccacacctccacgccggcgccctctcccaaattggcgtagcggcccgggccgcaggctgcgggcacctcggttccatcctttagaaccaccgtgagctccgccgtgctgaagccgccggtgtcgtcgctgtccatagtaacggtaaggggggagacggtgacgtgatccacccgccgccccgccagggtgcccgtccactccagcaccgtcgaggggtagtgctccagcgggaagtcgatgctccacggcccggcgatgtccacaccggggcgctcatagccgccgtagaagtacacctcccccagctcggccccctcccccgctttgatcagggggaagagcacgtccaggcccccctccacctgggtgatcaccgtggcgcgccagtatttctcctccgccgtccggcgctcgtccctggggtagacgcgggcgaggaaatagcccatgtccaaatccccgtggccgatgccaggggcgtaggccacccggacgtggaaccgcccgtcgctggcaaagcccatggaggagatggtcacgtcgccggtgccctccagtggcatgggtgtctggccgggggccagcaccacccgctcgtccggcaggatggaggcgggatagccgctctcctccacccccatcaccacccggtccccctcccccaggggcaggctgtccagaagggccgccgtcactccggcgcaggaggcgccggcgtccagctcgccctgccgggtggtcaggcgctccaccgccagatggagcgtgtccgggacggcgccgccggttgtgccgaggcccaccgcgccctccgtctggggccggtaataggacaggccagccgcaaacagggcggtgcggctctccgaatcgtactccaccagccggccggccagatcgctgtccgccccgcagtgcagggtgagctggctgtccagccggtccccctctacgtcgcggaccgtgaagtagacctctccccgcacgtcgtcggccagggcgctgagcacctgtatctcaatccccccgctggtgcacaccgccccctccacggtctgggccagcccggcaaaggggccctggcgggcctgcatatactgccacagggacggccccgccgccacggcggtggcgcacagagcggcgcagaccagcgcagccgctgcgccgcgtcggagcgcagaaccgacccgtttcgccgtaaaggccttttccctgacagcattttttcggttctcgtcgaataccagaccggccaccggccgctccagcgccttgcgcagctcagtcataataccactcctccagcatgggccgcagcttccgcttggcctgggtcagccgggcggacacggtgcccggcgcgatcccaagggtgtccgcgatctcctccagagtaaactcctcatagtagcgcagcagcacgacctcccggtacttccggggcagggagagcacggcgcgcaggggggtatcgtcccacggcgcgtcctccgccgacggctcggccagggcggacagctccatccggcgggtgtgccacggggagcggagcagatcccggcacacgttgagggcaatcgccgtaatccaggtgcgctccgccgccgcctcccggaaggtgccgtacctccgccacgcccggagcagggtctcctgggccgcgtcctccgccagtgcggcgtcccccagctggagggcgcacagccgcagaagccccgtgccgtactcctccatcagccgctccagatcggcggcgctgcccgcctgatgtgccatctcgctcccctcctctgctccattctatcccattggacgcattggcgggggattttcatgcaaaagggacggatttctttgaaagaaatccgtccctgggtgattgttcccggccgttgcgtcccctttattccagggggaaggtctcccccagaagggtgaccgaggccagctcgtccagcgccgcgggcgtctcaaagctccacagcccgaggttcaacccgtcctccgcgcccgcgctcatcatgcccatgggcactccggtccggacgccgttcttatcggtggcccacaccacgaaccaactcttgtccccgccccggtagtagacggcaatattcatgcccgacacctcgatgcgctccacatagaagccgtcctccagggtgcggcccaccaggatcaccctctgctccgccggctccagctccacagggaggctccactccccctcgatggccgcctcggggccgcggtaggccccgtagacccggatggaggccatgtccgccacgtcgtccggcgcaacgccgccgatggtgtagtccatgccgccgtccaccgcggtttgctccagcgtggagcccatctgcttccccgccgcgtcatagggcaccgccagcagccagcccgcgtcaaagccctcggccatggccaggcggatgtggaagcgcccctggccgtcaaagcccatggagctgatggtgaaatccgcggtgtcggggctggtctggggagtctgcccgggggagagcaccacggccccctcccccgtggtgtcggtgtccagcgcgcgggcgtcggccggaggctgaaagtatgcgccctggatatagcgctcgccggggtcgacgccggtgagctccagcgacacggcccggctggtgtccaggcccttcgcgctggcctccagcagcagggtgcggctctcagcgtcgtaagagaccacctggctgccgccgcttccggtaaggccctcgccgtccacctctaaccgtccagaaacgtgggtgtgaccgttgagccggtcgcccgtctcgtcggtgagggtgtagtacacccgggcggtatagccgtcgctgaccgccttcaccagctccagccggaggccctggccggacgtctccccctccacctctgcggcaaagggggcgtagggccccaggcgggcctccagcgcgtcccacagggtggggcccgccgccacggcggtgacgcacagggcggcgcacagggccagggctgcggccgcccggcggcccagccgccggggccgccgggccggcgctccctcctccagcaggcggttgagccgctccaccgccgccgggctgggccttagcccgtccatctcccgcctatagtcgttctgaaacatcgtcgtcctccttcaaataccgccgcagcagcgccctggcccggaacagccgggacttgaccgccccctcgcttttgcccaggacggcggcgatctccgccacactcagctcctcatagtagtacagatgcaccgccgtccggtacttggcgggcagggccagcaccgcctccaccacgccgccctccccgggcggctccggcgcgggcagcgcgtcgtccagcggcccctcccgccgccgccacggggcgcggagcacatcggcggcgcagcgtgcgcccacccgcagcagccaggccttggcgtgctcctcgtcccggaactccggcctggcccggagcaggcggacaaagacctcctgcatcacgtcctccgcgtccgcccgggagccggtgcgggcgtaggccagccggtagagcatcccggcgtactgctccgccagggccgccggttcccgccagcgttcctccatgggcctccctcctttctgcctttaacacggcgcggacggccgtttggtttcgcatccgcgcaaaaaaagacggatttcccccatgggaaatccgtctgcccatatgcgggcctctccttaccgtttttcctccgccggggcgggcggccacaagggccgcccctacatcgctgctgcccgctccaccggcgcggcgcacatactgccagtacggaaaaagcgtgggcctgtccccacccgtcacacccccgcgggctccccggcggcggcgcggaacaccgcctccacgtcggcccgctcggcgtggccctcgtgcaccttcacgccgtccacatagtagcaggggacatagtagtagtcaaaggtatcggcataggcgggctccgccgcctcgtccaccattcggagggggatgtcccgccacgcggggtgctcctccagcagctcctcctggagccggagggccagcctgcagtggggacagttgttcagaagaaacagggtgatttctttcatttgcgcacctcgaattccacgtcgatgtcgcccccgcacaccatgcccagctcggccgcgccgggggtcagatcatagtgtctccgcaccgggccgcccccatgcgcccacagggcctttgcctcctggacggccaggtgctccaccgcgccgccgccgatggtgcccagcaccgaaccgtcgggccgcaccagcatccaggtacccacaccccggggggcggagccccgtttggcggtgatggtacacagcacgcccggctctcctgccgccgggggcgcggccgccggaccccggcgggcccgctcctgcaccagctcggcggcgatggacacggcgatctccgccggggtctgggccccgatggacaggccgatggggctgtgcaccccgtccaggatttcccgggcaatgcccgccgcctccagggcggccttcaccgccgccaccttggttctgctgccgatcatgcccgcataggcgtacttcccccggagcacgtgctccaggcagtcccggtcgtgggcgtggccccgggtaagaatcacatagtagtcgctctcccggctgcccagggcgtccagcgcctcccaaaagggggcgcacaccacctgatcggccatggaaaaccgctcccggctggcaaactccggccggtcgtcgatgaccaccagctcaaactccagccgccgggcgatgtgggccacctccagggacacgtggccgccgccacagaggatcagacgctccatagacccgccctccttccaaagtataaaagcccctccagcacgccgccgccgatggcacgggccttgtcggagacggtgaagcagtgctccgcccggcaccgggggtcgatgtcccccgccttcatgcccgccgtgacggccagcccggcggggagcatcccccgcaccacgccggtgagctgggcgcaggccgtccggcccgccacccgggccaccggctggccctcctccacccgctggccgatggcggccagcggctcgaacgccccgtccgccgggacgcggatgatgcgctgggtggtgtagccccccacatcgccggggacgccggtgttgggggcggcgctcccccgggtgagcaggcggcccagatcgtgcccccgcatggtctccaccacgccgtggcagtccaccccggcggtgaagccgggccccagggccagcaccaccggcgcgtcggtaatggccgtgcccaggttgcgcttggccaggatggcgtccaccaccccgtcaaagggcagctccatcaaaatggccgcctccggatcgcagagcacgggaacctccccccgctccagcgcccggcgggccgccccggcgtcctccgcccggcgggcggagatcccctccacctgggccgcgccgtcgtacatgcactgggagaaggccaccgtccgacgcaccgccgtgggctgggccacctccgtcatgaccaccggtatgcccgcccggtacagccgcaccgccgtgccggtggccagatctcccgctcccttgatcagaaccagcataatccgccccgctcctcctcccgatagtaggtaatggcgctgtgaatgccccgctccgccagccgtccggccaccgcgctggcgtgggccgcccgctggggggtgtccgccttgttgagcacgcagcggaaggccatggcctcccccacgcccttccgccccccctgggggttggccagcagaagggccacgtcctcgggggtgagcacgtgctccgcccccgcgcccagcagggcgcacacccgctccggccggtggcagaccgcccccacggcctgtcccaccgcgtccatgcccgccacggcggccacggcgtcggcgcagggggggatcaccggctcgtgctccgccggggccttgaggggcaggcgcttggccccgtcggcctccaccagtaccacatcggccgcccggcgcagctcctccggagttcccgcgccggagagcttgtccccccgaaagaccgtccccacggtgaccaccccgtgcccttccagggcggcccgcaggcgctccggcgtcggctcctccaccaggggcaggccggggtggcgcagaatatgggtggtggtggtgaccaccaccgtccgcccgctgtccgccgcctgccgggccagggcatacagggtggaggtcttgccccccgcccccaccagggccaccatccggtggcgggccatgtccaggcccaactgctcccagatgcccatgctcagccccccgacaggtgctcgatgaggatcttcacaccgatggcaatgagcaccagtccccccgtcagctcggcccgccgctggaacaggcagcccaggcggcggcccaccaggccgccggtcaccgacagggcaaaggccaccacgccgatgaccgccgcagaggccagaatatggacgctcataaaggccatagacacccccacggccagggcgtcgatgctggtggcaatggccagcacgcacagccgccgggcggacaggtcggggggcgcctcgtcctcctccccgcagccccggcgcagggactcccacgccatcttgccgccgatgacggccagcaggccgaaggctacccagtggtccaccgcctcgatgtactggctgacgctgctgcccagcagccagcccagaaggggcataagaaactgaaacgtgccgaaccacagacccatcttaacggcctgccggggaccgaagccggggatggagatgccgctggacacggataccgcgaaggcgtccagcgccaggctcacggcaatcaggaaaatctcaaccaaaccaatcacctgtctgcaaaatattgttaggagagtgaaatttattatagcataccttccatggatatgctataacaattagagatatgaaggcacaacatgggagggctttatggaacacgaggagtacatgcgccaggcgctggagctggccaggctggccatggcggagggagaggtgccggtgggctgcgtcattgtgagggacggcgcggtggtagggcggggccgcaaccggcgggagactgcccagaccgcacttggccacgcggagctcgaggccattgcccaggcctgccgcaccctgggggggtggcggctggccggatgcgccctctacgtcaccctggagccctgccccatgtgcgccggggccatcgtcaacgcccgcatccccgccgtatactacggggcgaaggatgacaaggcgggctgctgcgggtcggtgctcaacctctttgaggagcgcttcaaccaccacccccgcatttacggccgggtgctggaggcggagtgcgccgctctgctccaggaattttttcaatctttgcgctgatttaacgcttttttaacaaggcgtgctcgattttgtaacaaccccctggtagtataacacttgcaagagacagagcttcttttcattctatcctccaatcatgtgacgggcagcgggtgagcaccgctgcccgcctcattttaccggcgctttacataaaaagcgaattatttaaaggttctgtaacacattccgatttattcgttaacatctttcgggtattataatacttgcaagagacagtttcttttcatttcattgtatcctctttccttcgataaggccggacgtcaggagcagacgtccggcccttgtcgttatttgcgcataaagcagcgcccccggcaaaggccgggggcgctgcttttgtctctcttgtccggtaaaacagagccctaccgctcctcccggaaatacgccaggcccaggctggccggggactgcttgtttccccaccgggcctgcggccccgcgggggccccgttctttttctgcggccgggggaactgaattcccccggcctgcgcgcctccggcgcgtcccgcctgcggcgggttcctccgcgccaagcagccgggaaagcgggtaaacatccgtggcttaccgctcctcccggaaatacgccaggcccaaactggccggcggctgcttgtcgcggttgttgcgcatggaggtaaagaccagcacgatcacggtgaccacatagggcaggatcttgtagatctggtcggggatgaggtcgatgggcatgcgcaggtagagaatgagcaggccgccgaagaggatggaaccccagatagcccggtaggggctccacaggcagaagatgaccaacgccacggccaaccagcccacgccggagaggccctcgtggttccaaacgccgcccaccacggtcatgatatacaccatgccgccgatggccgagatgccgccgccgatgacggtggccagatacttgcagcgggtgacgctgatgccggcggcatcggcggtggcgggggactcgcccaccgcgcgcaggtagaggccggagcggctgtggtggaggtacaggcccatggccacggccagggcgatgcccagataggtgaaaatgctgtggctgaagagcagcctgcccaccaccggcagctcctggaggaaggccgggaagggcgagccgttgaaggcccccttcagggtgttgctgacggccacgtaggtgccctcccgcacccgcatgaattcaccgatgtactggcccacgccggtgccgaagatggtgagggccaggccggtgacgttctggttggcccggagggtgatggtgaggaagctgaagagcagggcggccagcgcgccagccaggaaggaggcggcgatggcgatgaccaccgccaggggggcggacaccgccgcgcccgccagcttctcatagtagaacgccgcgcccaggcccagggcgccgcccatgaacatcatgccctcgacgcccaggttcaggttgcccgacttctcggtgaggatttcgccgctggtgccgtagagcaggggcgtgccgtagaggacggcggccgtgatcaggttgagcagaaaggtcatttcgccgcctccttcctcttgtggcgctcctccgcgccgcggaagaccagcttatagttgatgaagaactcgcaccccagcataaagaagaggagcacgccggtgatgacgtcagagagggacgcggggacgcccatctgggtgttgagggtgtccgcacccttctggaggatggccagcagggcggaaatgcccaccatggcgaaggggttgagctgggccagccaggccacggtgatggcggtgaagcccgccccggcggccacgccggagtacagggtgttgttggcgccggagaccagcaggaagcccaccacgccggcgatggcgccggagaggaacatggtgcgcatgatgacccagcccacgttcatgcccgcgtaccgggcggtgttctcgctctcgccgatgacggcgatctcatagccgtgcttggtgtacttcatgtagataaacatgaacaccgtcagggccagcaccacgatccagccgcagtacacgccggccacccggggcaggcaggcgttggaggcgaactgctcaatctgctggctgccccgggggatcttctcccacgggccgccctggagccacttcaccacgccgatgatgatgtagttcatcatcagggtgaacagagtctcgttggttccccagcgggccttgaagaaggcgggcaccagcgcccacaggccgccgccgatggcgccggcggcgcacatgaggagcagcaggggcacctgggggatggagtcggcccagaagagggcgaaataggtggcgcacatggcgccggcggtgatctgtccctcggcgccgatgttccagaagcgcatcttgaagcagggggcaatggccagggcggtccccagcagggggatgaagttcttcacggtctgccggatgccggaggtcttgcccagggcgccctccacgatgatggagtagccctggatggggttgttgcccgagagcaggatcaccaggccgcccaccaccagggccagcaggatggccgcgatgcggatgccccactggcccgcgccggccatgccgtcccgcttggccaggcggatcaggggtgttttgccgctgctatgcacgctcgcccgcctcctttccgccgcccacgtgggtcatgtagaggcccacctcttcctttgtggtattccggccgtccacgatgccggagaccttgccgccgcagagtaccaggatccggtcgcacagctccagcagcacgtccagatcctcccccaccaggagcacggccactcccttcatcttctgctggttgagcaggccgtagatggtgtaggacgagttgatgtccaggccccggacggggtaggcggtcataagcacggtgggggtggagtcgatctcccggcccaccagcaccttctgcacgttgccgccggagagccggcgcaccggggtgccgacgccgggggtgacgatctccagctcgtcaatcagccgctgggccagcgcccggggggccttgcggtccacgaaggggcccttgtgctcccggtaggtcttgagcatcatgttgtccaccatgtccatgcccgccaccaggcccatgcccaggcggtcctccggcacgaaggccagggacacgcccacacggcggatctgcatgggggtcttgcccaccagctcctcgccgtcccggtctacggggacgtggtagccggcaatgtcgctgttggggtggggcgggcaatagagcacgctgcccgcctccgcggcctggaggccggcgatggcctccagcagctccttctggccggagccggcgatgcccgcaatgcccaggatttcgccgccgaaggcctggaaggacacgtcatccagggtcttgatcccctcgtgatcccggcaggtcaggcccttgacctccaggcggagatcccggtacttggcctccggccggtcgatgttcaggctcaccgcccggcccaccatcatctcggtgagcttctgggggtcggtgtcggctgtgtggacggtgccgatgtacttgcccttgcggaggacggccacccggtcggagagggccatgacctcgtggagcttgtgggtgatgatcacgatggccttgccgtcggcgcgcatgttgcgcaggacggcgaagagcttttccgtctcctggggggtaaggacggcggtgggctcatccagaatcaggatgtccgccccccggtagagcaccttgaggatctccaccgtctgcttctccgacaccgacatgtcgtagacctttttgccgggatcgatgtcaaagccgtacttttcgctgatctccttcacccggcgggcggcggcccggagatcgaaggcccccttcccctccaggcccaggacaatgttctccgccgcggtgaacacgtccaccagcttgaagtgctggtggatcatgccgatacccagggcgtaggcgtccttgggggagcggatggtgacctccctcccgcccacgcagatgtgtccctcgtctgggaagtagatgccggagatcatgttcatcagggtggtctttccgctgccgttctcccccagcagggagagaatctcgccgcgccggacctccagatcaattccgtcgttggccacgacgcggccaaaccgcttggtgatccccttgagctggatcgcgctgacctgttccaaacccagcctcctttcccggcccccgcggggccgaagcgttctcttctctcgcactcgctgttcctcgcggcaaaggcccccggcgcggtcgcgggggagaaatccggggccggcccgcctgggccggccccgcctttgcttccggtttgatcttttgtttactcctcggtgatgccgtcgatgacgtagcagaactgaggcgcggacaggccgccctcctggctcaggtcggattcggggaagaactcgccctccccgatgctccacacctcgccgtcaggattctgggccgggtggccggacagggggccggcgaacacgtgcaggccgcccgccagatcggcctccgccttttccagcgcctcctcagtgccgggggcggcaatggcggtgttcagctcggtcagcttgacggagccatcggcgtagccggcagtccagtcctggtcaaagctctcaccgttggccacggcggagatggcatagacgaaatagggcgtccagtccacgcggcaggagatgaggctggcctcgggggccacgccggtcatgtcgttgttgtagccgcagtggaacacgccggcgtcctgggcggaggtggcgggggtggtgttgtcggaatgctgggaaatgagcacgcagccctcgtcggccagggcggaggcggcggcggcctcctggggcgcgtcggaccaggagttgacgtacttgaccttcatggtgacagagggacacacgctcttggcgccctggtagaaggcggtgtagccggaaaccacctcagcaaaggggaaagcggccacgtagccaatgacagcctcctcggcggtgatggtgccctcgtcgatcatctgctgcagcttcatgccgccggccacgccggccaggtagcggccctcgtagatgttggcgaaggcgttgtgggtgttgtccagatcgtccacggcagaggcctggttggtacaggagatgaactcgatttcggggtagtcgggggccaccttcagcataaagggctcgaagccgtaggagttgttgatgataatatcacatccatcctcggccagctcgatgttggcgtcctcgcagccggagtcctccaggatatttttcttgtagctccactccacggtaatgccccgctcggccaactgggcggtggcctcctccacggccttcataaagttataggtataaccctggtcgttctcgtcgccgatgcaaaccatgcccaccttgacggttttaccctcggcggagggctcaccagtgccgtcagtcaccggggtggtctccccgccggccggggtgttggcggagccctcgtccccgctgttgccgcaggcggccagtccaacagacatagcgcccgccaggagcagtgcaagcagtctctttttcatcgtttaagttcctccttaattgcgtctctcaatcaatcgggtcctctattcaaaacggctgcctgaacacgggggcactcccccctgctcaccgacgggcgccatacgcgccgaacgccaaaatcatccgctcatcacggagggacgtcctccgcctgcggcagccggtcttgctgtgtaagacaggagcccggaggctccccgacgaaccgtaagacctcggttcatccggcggaggcgcccgcctccgcttttctcttcgctttctttcctccgccctcccggcgggcggccacaagggccgcccctacgggatgcggcggctggagctgtgggctcagcagaactccacgccgccctccacgctcatggctttgatgcgggccagggactccacccggactcccataccgcggatcaggtcgccgccgggctggaatgccttctccacacagatgcccgcacccaccagggtggcgccggcatcctgcaccaggttgatgaggccctgcagggccgagccgttggctaaaaagtcgtcgatgagcagtacccggtcctcggggtgcagaaactccttggacacgatgatgtcgtacaccttgccgtgggtaaaggactccaccttggaggtgtagacatcgccggcgatgttgcgggtcttgttcttcttggcaaagatcaccggacaatcaaaaaactgcgcggttacacatgcgatcccgatccccgatgcctcgatggtcaaaatcttggtaaccccgcagtccccaaacaagcgcaggaactccttgcccatttcctggaacagcttcacgtccatctgatgattcagaaagctgtccaccttcagcacgccgccttcacggattttcccgtgggtccgaatgcgctcctccagcagtttcattatgtccctctccttactccacaagaaaaagttatttctattgtatcgaatttgacagacaactgcaactgcctatattctatcaaaaaagattgctttcgtcacctgtttttagaaattttgtacggaggttctccccgctttccggttttttcattgtgcttttgcgccgggtttggtacaatgctgttgatcgcttttgagcaaggaggtttattgttatgaaacaccgtttctgtgcggcagccctggccgccgttttgcttttgagcgccgcacccctctcccccgcggccagcgccgcattttccgacgcggagggcacctgggccgcagaggtcatcgaaaaggcggagggctatggcctgatgaacggctaccccgacggcacctttggcgtggggaaggagctgacccggggcgagtttgtggccgtgctctgccgcatgttcggctgggatgccgcctccccgggcgcgccctcgttttccgactgccccgcctctcactgggcctactcctatgtggagaccgccctggcccacggcgtgatggatgccggcggcgccttccgtccggaggactatatcagccgggaggagatggcggtcatgctggtgcgggccctgggctacggcacgctggcccagtccctgtccgggctggagctgccctttgacgacatcacggacaaccgggggtacatcgccatcgcctacgacatcggcatgatcaccggcgtggccggggcgggcggccagctcaagttcctgccccgcgactccgccacccgggaggaggccgccgccatgctggtgcgggtgtacgagcggtacacctccaagctggactggctccacggcttttacgccttctcctcctattcccagattgatctcaccgcctccatggacgcggtgagcgtaggctgggcccggatggagtacgaccccgccgccgggcccgtcctcaactcctcccgcacaaacggcaacgactgggtgcgccccgacgaccccacccccgccaccgattactgggatgcccgcagcctcccctacaacttaaatgtatatgcctcagcgggcgattccatccccctccccgacggcaccaccacctccacggtggcggcggtgaccggaacgcccgaggtccgggcccaggccgtggccgccctggcggccgccagcacggactacgcgggcctgaccatcgactttgagggcctgaagggggataccataaaactgaattatgtaacctttctaaaagagctggatgccgtcctgccccaggggaaaaccctctatgtctgcgtccagcccgacacctggtacaccggctttgactaccggggcattggcgaggccgccgacaaggtgatcctcatggcccacgactaccagtggacctccgtccccgactcctatgtaggcactaccaacaccgactcccccgtcacccccttcgccagcgtgtacgaggctctgcgtgatcttaccgacccggccaccggcgtggccgaccggagcaagctggccctgcagatctcctttggctcggcgggcttccacgtggacggagaggaccgcctgctggagaccactatctaccaccccgccccctccaccctggccctgcgcctggcccagcccgacactcaggtggtctactcggaggaattccgcaatccctgcgccctctacactaccgaggacggcagccgttacaaggtctggtacgagaacgagcaaagcgtgctggacaaggtggcgctggcccggatgttcggcatcacaggagtctccctgtggcgcatcggcaacattccggcggacggtacctacgacgtgtggagcgccctgctgacccagcgctgacccgcttaccatctacttaggaagtgaaacggatgaccaaccgcaaggaactgctgcgcgaattcctgctgatgaacctgggcaccctgctggtgtcggtgggggtctactttttcaaatttcccaaccatttttccatgggcggcgtgtccggcctggcggtgctgctgggaaagctgctgccccagctctccccctctaccttcaacaccatcatcaatgtgctctttttggtgctgggctttgtaatgctcaacaggggcttcggcgcccggacggtctactgttccattctctccgccgggctcattcagctctttgagtgggcgtttcccatggaccgtcctctcaccgaccaactcatgctggagctgttcttcgcggtgatcctccccgccctgggctccgccatccttttcaacatagacgcctcctccggcggcaccgatatcgccgccatgattctcaaaaaatacaccggcctggacgtagggcgtgccctgctcctctccgacgtggtcatcgcggcggccgccctctttgtctttgacatcacggcgggactgtgctccctgctgggcctggccctcaagtcggtgctggtggatagcgccatcgagtccttcaaccggcgcaaggcctttttcgtcatctcctacgacccggagcatgtgtgcgactatattacccataccctgggccggggcgccaccgtatggcaggcccagggcgcttatacccacgcagagcaccacgtggtgctcaccgtcctcaccagggggcaggccgtgcttctgcgccgctacctgaaaaagattgatccccatgcttttctgattgtagccaactccagtgaaatctttggaaagggcttcttacagccctgattctccgcccgcccggacctaaatgccgggcgggcttttttgctgtgcaggagcagagcaaaattagccctgtgccgcttaacagcggcacggccatgggatgacagcgcgtgggtcggtacggcccacatacgcaaccacttcatgcgcctgagcctttgcgtcgtttcgcggtacgccctgtgcgcactaagctttctgtcattttggaaaatatttcccaatcgacggcattcggctttttttgcgccaaaatatggtaatatatggttagtcaatattctaccgcaaaggaggctttccgatgtccttactgcgtcgaaaaggactgtttgagagcaccaaagtgctgtttctccccattgccgccatttcccccaatccggaccagccccgcacctgcttttcccgggagggcctggaggagctggccgccagcattcaggagcttggcgtactccagcctctgtccgtccgccggtccaagaacggcggctacgagctgatttccggggagcgccgcctgcgggcctcccgcatggccggtctcaccgaggtgccctgcattctggtcagcgtggacagccagggctcttctttgctggccctggtggagaaccttcagcggcgggatctcaactttgtggaggaggccaccgctctggccaagctgatcgagacctaccatctgtctcaggaggaggcggcccgccgcatcggcaagtcccagtcagcggtggccaacaagctgcgcctgctccgcctcccgcctgatgtcctcactctgctgcgggagcgcggctgcaccgagcgccacgcccgggcgctgctccgcctggaggagccggagctccagcgcatggccgcccggcatgtggcagagcaggggcttactgtggcccggacggaggagtatgtggaagccctgcttcatccggcagacaagcccgcccgcaaaaaaccaacctttgtaattaaggatgtgcggctgtttctcaacaccgtgactcggggactgtccatgatgaagagcgcgggcgtacaggccaactgcaagcgccaggagacggaggactccatcttgctgaccatcactattcccaagtagaggcgcgccgtacgcggaggccatggcggtttttctgaaaggatggggctgtttcacgtgaaacagctccatcctcttttttttcctgtttcacgtgaaacagtgcgaatttcagttgaattacgtctaccgccgctatataatagaacctgaccctttgcaacgacccaaaaaggcaggtgtgctatggcaaagaccattgcgattgtgaatcaaaagggcggcgtgggaaagactaccacctgtgtcaacctggcggcggctctaaaaaatcagggctgccgggtgctggtgtgcgattttgacccccaggccaacaccacttccggcttcggcgtagacaagaccacctcgcccaacatctatgacgtgcttctcaacgggacggagaccgctaaggccatctcctccacctcctacggcgatgtgctcccctccaacaaggcgctggcgggggccaccattgagatgatcgccctggagcagcgggagtaccggctgaaaaacgccttggagcaggtggcggaacactatgactacatcttcattgactgtcccccctccctggaactactgaccctcaacgccctgtgtgcagcggataccgtactggtaccggtgcaatgtgagtactacgccctggaggggctcagcgaccttctctccaccattcgcattgtcaagcgatccctcaaccccaaaattgccctggagggggtggtactcaccatgtacgacggccgtaccaatctctccatgcaggtggcggaggaggtcaaacgccacttccccggccaggtgtacgccacggtgatcccccgtaacgtccgcctgtccgaggcccccagctttggcaagccggtgtccgcctatgacgccctctcccggggcgcggaggcctacgatgccctggcccaggagctgctggagcacaatcaatacgccgtcacccgtgtggaaaggaaggattgacctatggcattggaacgcggcctgggcaagggcctgggcgcactgctgggggacgccgccctccagtcccaggaggggggctccctctccctccccatctcccaggtggaaccggggctcaagcagcctcggaagcggtttgacgaggaaagccttcaggatttggccgactccatccgcatccacgggatcattcaacccctcaccgtccgccggctctcgtcgggctactaccagatcatcgccggggagcgccgctggcgggccgccaagctggcgggcctgagcgaaatccccgccgtcattatcgaggccgacgaccgcaaggtgatggagctcggcctgatcgaaaacctccagcgggaggatctgaacccgattgaagaggccaacggctacaaggtgctcatgagcgaatacggtctcacccaggaggaggtggcccagcgggtgggcaagtcccgccctgccgttgccaacgccctgcggctgctgacccttcccgacccggtacacctgctgctggaggagggcaagctctccgccggccacgccagggccatcctggctgtgcccagcggggagctacagaaaaagctggcgcagaaggtcattgcggaggagctctccgtccggcagaccgaagctctggccaagcggttggccgcagaacccagagaagctgcggagcccaagtccgccgccggccctgacctgtccatttatctgcgggaggcggaaaagaccctggccacccgctttggccgcaaggttcacatcatcaacggccgcaaaaagggaaaaattgagctggaatactacaatccagaggacttgaacactctgctggagctgctggagcagcttccctccgccgggaaaggaggggtttccctttgagcactgattccgacaagcaggagcgcagccgcctccagcacgaggcggagcatgagcggccccacaagcgcagctcggtactgctctatctggtcatcctctttgcagcggcttttctcctgctgctgatgtcctacttcatgcagcagcgagccaaccaggaggccatggacaagctggagcagacctccgactcggccacccagtccctggagaacattctccaggaaaacgaaaccctcaaggtggaaaacgaggccctgagccagcaggtggcccagctccaggaggcgctggaggacgcagaaagcgcctccgacgacgaagccgccctggtgcagctgaaggcgctctgctatttgaaccaaattcgcgccctatacaacgacgggcgctactccgatgcccgggatgcggcggccgccgccgaggccgctctggctggagcgggcggcatggagggggtactgggtacggtggccgatggtctcaccgaccagcagcgacaggactacaaccccctggaggcctaccagtctctcatggagtggctgggctgattgtttcacgtgaaacggcgtcgggacaaagtccgctccatttcatccggcgctgtgcgccggatatccattccactcccttgtccctccgcttccccacgcgacccgctccgctgggctcccgtgggggccccatctgcacaaagtccgctccatttcatccggcgctgtgcgccggatatccattccactcccttgtccctccgcttccccacgcgacccgctccgctgggctcccgtggggccccatctgcacaaagtccgctccattccatccggcgcacggcgccggatatccattgcactcccttgtccctccgcttccccacgcgacccgcttcgcacttttctctcccctataggggcggctttatggtcgcccgcgggcgactacaagggtcgcccctacgggtttatctcacaccactttattgaaggagaatcaaccatgctggacattaaatttatccgggaaaatcccgacgccgtgaaggagaacatcaagaagaaatttcaggaacagaagctccccctggtggatcaggtgctggagctggacgcagagaaccgccgtaccatccaggaggcccaggaactgcgcaccgcccgcaacgccaagagcaagcaggtgggcgtactgatggggcagtccaagaaagacccctccaagctggcggaggccgaggcgctgaaggccgaggtcaaggccgacgccgaccggctggccttcctggagggccgggagaccgagctggccgcggagatccgccgcatcctgctccagatccccaacatcatcgatccctccgtgcccatcggccccgacgactcctgcaacgtggaggtgcaacgcttcggcgaggcagcaacccccgcctttgaaatcccctaccacacccaaatcatggagtccttcgacggcatcgacatggacgccgccggccgggtatccggcgcgggcttctactacctgatgggcgacatcgcccgcctccacgaggcggtgctggcctacgcccgcgacttcatgatcgacaagggcttcaccttctgcatcccccccttcatgatccacggcaacgtggtggagggcgtcatgagccagaccgagatggacgccatgatgtataagattgagggagaggatctctacctcatcggcacctcagagcactccatgatcggcaagttcatcgaccagatcatccccgaagacaagctgccccagaccctcacctcctactccccctgcttccgcaaggagaagggcgcccacggcatcgaggagcggggcgtctaccgcatccaccagttcgagaagcaggagatggtggtggtgtgcaggcccgaggagtccatggactggtacgagaagatgtggcgctggtcggtggagctgttccgctctctggacatccccgtgcgccagttggagtgctgctccggcgatctggccgatctcaaggtcaagtcctgcgacatcgaggcgtggagcccccgccagcagaagtacttcgaggtgtgctcctgctccaacctgggcgacgcccaggcccgccgcctcaagatgcgggtcaagggggagaacggcacctacctgccccacaccctcaacaacaccgtggtggcccctccccgcatgctcatcgccttcctggagaacaacctccaggccgacggcagcgtgaagatccccgccgccctgcggccctatatgggcggcaaggaagtgctgacgcccaagcagtaagccgctctcccacgtattgaaaggagcgcctttgtcatgaagcaccgcttaccggccgccgctctcctgctcgccgccgccctgctgctgggcggctgtaccgccgggccccagcctgcggaatccgcccagccggaggagacgcttacccaggagcagattgacgctatctcagaaaagtacggcctggaatcccccaccccgcacacgccccccatggatatggactggggctggagtgtcaagaatccctaactggggctattctccccgttcttttgtcgcttatcgtttaaataaggagtttttatgtctgctaaagagaaaaccaccggctttttggccgaattccgcaaattcattgcccggggcaatgtgatggatctggccgtcggcgtcatcatcggcggcgcgttcaagggaatcaccgactccctggtaaacgacatcctcaacccggtgctcggcatcttcgccggggacaatgaggccctggctggcctgtctatccccctgcccggcggcggcgacctcatgctgggcagctttctcaacgccgtgctcagcttcctgattatggcgtttgtggtgttctgcatcgtcaagctgctgaaccgtctccacaaaaaggaggaggccgcccctcccccgccccccaagccatcggcggaggaggcgctcctcacggagatccgggatcttttgaaggagcaaaaaaatggctgaactaccagataataaaaaccagaaggagccgtcctcctatacgcctgcctcccctgtcaagcggatcattgcctgggtgggggtggcctacatgctgatcttcgtcgccctcaacctctacccgtttttccacggcggaacctatctccgggggctggcccccctgctggtctgccccggtgccgccggtctggcggtgattgccgtctggcagttccgccggccggagtgcacctactccaaaaaggcctgcatggccctgctggcggcggcctgcggagtgatccttgtaatcggcctggtgcagggcgtgcccgccctgctggccggactgggggtgtgagcatgcaagcgcgtattgcctccggcctgaccgccctgggcctcacgcctcccgacggcgcagcggcccggctggctgagtacggccgtctgctgctggagcagaaccaggtcatgaacctcaccgccatcaccgagcccgaccaggtggccgacctgcactttctggactccgccgccctgctcaccctgggggaggacctccggggcaagcggctcatcgacgtgggcaccggcgcgggcttccccggcctgcccctgcgcatcctggagcccagccttcagctcaccctgctggacagcctgggcaagcgggtgaattggcttgcctcggtgtgcaataccctgggcctggagggggtggagtgcctccacgcccgggcggaggagcaggccctggtggacggctaccgggacggcttcgactacgccgtgtcccgggccgtggcctccctggagctcctgtgcgagctgtgtctgccctatctgaaggtgggcggcagatttctggccatgaagggcgtggacagcggcgaggagatcaaccgcgccgcccggtgcatctccatcctcggcgggcggctgctgcccagtgtggactatgtcattcccggcgccaatgtgcgccaccgggtggtgctggtggagaagtgcacccccacccccaatggctacccccgccggtgggcaaagatacagaaagccccgctgtagcaggaattttctcactattctgcacaaaaacccattgattccactgtggaagtatgatatggtatttacgtcaaacaacgggagtgaacctatgtccactgcaattgtgatcacgtcgggaaagggcggcacgggaaagacctccattaccggcggtgtagcctcctgtctggccgcgctgggccaccgggtgctctgcatcgacatggatatcggcctgcgcaacctggacctgaccttgggtctgagcgaccgggcgctgatggacttcactgacgtgctctgcggccgctgcacactggagcgggccgccgtcccccaccccgtcatccagggcctgttcctcctcaccgcccccgtcaccctgcccgaagcgccgctcagcgaggcggccatgaaggagctgattcaccgggccagggaggggtacgactacatcctgatggattcgccagcagggctgggcgaggggttccgtctggcctgctgtgcggcggaccgggccatggtggtttccacgaccgacgcctccgccctgcgggacgcccagcgcacggtttcggtgctccggaaccgcatcccccgcatccatctggtggtcaaccgggtacagccccggctgctccgccgccttcacaccaccattgatgacgccatggacgccgccggcctgcccctgctgggcattgtgccggaggatcctcaggtgatgctgtgcgccaaccagggccagcccctcattctccgggccagccggggcgccgccgtcgcctatctcaacattgccaagcgcctgcttggccagaaggccccccttatgaaaatacgataagcgcaacacgctgtggaagagaggttagtacgatgaatattgccctgatgagccatgaccggaaaaaagagctgatggtgcagttctgcattgcctactgcggcattctctccaagcataccatctgcgccaccaacaccaccggccgcctggtggccgaggccaccggcctgcctgtccagctcttcctctcccacgagcacggcggcagccagcagatcggcgcccgcatcgcctacaacgagatcgacatggtgcttttcttttccgacccccagtccaacgatctggacgcggatctgaagtatattaccactctctgcgaccagtacaacatccccttcgccaccaatgtggctacggcggagattctcatccacggcctggagcggggggacctggactggcgcgatatcatcaaccccaagaccaagccctttaccgcctgagccgtagctcgttccgtccccccgctccaggacgccgcctacgggcggcgcggcggcgtatgccgccgaaggccgacgaaatttagttccggcggtcgcaaataaaatcaccggggtccccgcacggtgcaaggcaccgggtggggcgcggggggatctggactggcgcgatatcatcaaccccaagaccaagccctttaccgcgcaactgggcggttcccggttgactttttccccgctttggggtagtattgtggagcaaaaaccgccctgacggggcaagtaccgcccacaccgccgcagcagagaagggcgcctccggctgaaagcgtccgcggcaggaggccgggagacggccttaccagcgggcccggagacgggtgtggtccccttcccgcaacagaaggacagagggagcggaattccgctctgaacatgggtggcaccacgaaagcaggcgctttcgtcccgtggaaggggacgagagcgcctttttacggcccaacctgcggcctctgaatcccccgccgcccggtaggggccgacgccccagggcggcctctcttgcccctctggggcaattcaccttctgcccacaccggcccggccattgtggagacgggacgcaccctgtccggcttcatggaactgctgaccccagcgggtcggtgccccgccggggcccctctttttcattcaaacaagccgaagtgaattcggactgttccaaggttttgctgcgcaaaacgcttgacgccgcttccgcggcggcgcgggcagcagcctcaattactgttaaaaaggagcatcactatggcccagatcaaaccccgcaccctgtccggcttcatggagctgctgcccgcgcggcaggtacagttcgaccggatggtggagattctgcgcaagtcctattccctgtacggcttcacccccctggataccccggccatcgaggcggccgaggtgctgctggccaagggcggcggcgagacggagaagcagatctaccgcttcaccaagggcgactccgaccttgccctccgctttgatctcaccgtgcctctggccaagtatgtagccctgcaccagaatgagctgaccttccccttccgccggttccagatctccaaggtctaccggggagagcgggcccagaagggccgctaccgggagttctaccaggcggacatcgacgtcatcggcgacggcagcctggacatcaccaacgaggcagagatcccctccatcatctacaagacctttaccgccctgggtctgcgccgcttcaagatccgggtcaacaaccggaaggtactcaacggcctgttcgccatcctgggcctggagaagcaggccggggacgtgatgcgcaccatcgacaagctggagaagatcggcccggagaaggtgcgcgccatcctgacggacgacttcgccgtacccggcggggcggccgacgccctgctcgccctcctggccgccggcgatcccatggccgcgctggagcccttcaaggggaagaacgagctcttcgatctgggtgtggccgagctggagaccgtggtcaggtatatgtccgccttcggcgtgccggaggatcacctcatggtggatctcaccatcgcccgcggcctggactactacaccggcaccgtgtacgagaccgtcatgctggaccacccggaggtgggttccatctgctccgggggccgttatgataacttagcggaatattataccgataaacaactccccggagtcggcatttccatcggcctcacccgcctgttctccgtactggaggcccagggctatctgaacgacgccctggtcaccgccccggcggacgtgctgatcctccccatgaccgaggagctctcccccgccatctccttcgccaccgccctgcgggacgcgggggtgcgcgcccagctccactgcgagaagaagaagttcaagcagaagctgtcctatgcggacaagctgtccatcccctacgccgccttcctgggggaggacgagatccagcagaacaaggtgacggtaaaggatctgaccaccgggcagcagcagaccgtgacggctgaggaggccgtggccctggtgcaggccgggctggctgcccgggcgggcggcactcccatccaggagccggaggcctgatggaactttttccccatgtccccgtctaaatggggaaaacccgacgtacaggaggaaatgttccatgaaaaagcagctcatcgccctggccctatccaccgccctgctggcaggctccgccgctgccatcgcgccggaggaggccttccccgccgtcaacacctatcccggctttgccgatgtggccggttcggcctggtacgccgccaccgtccagacctgctatgaggtgggcctcatgaccggcaccggcgccggctttgcccccgaccaggtgctcaccgtgggcgaggtggtcgccatcgccgcccgcatgaacgaggccatcaccggcgactccatttacctggtggattccaccctgccctggtacgcctcctatgtggactatctggaaaaactgggggtggaggtgcccgatcccgtcaagcaggccacccgccaggagttcatcgccatgcttgccgccgtggtgcccgaggatatgctgacccccatcaaccagatcaccgccctgcccgacaccgccgacgccgccgtgctgtccttctacaacgccggcatcctcaccggcgtggacgactggggcacctttgcccccgacaagaccctcacccgggcggagaccgccgccatggtggcccgggtcgcccggccggagctgcgggagagcttcactcccgccgactacgccatgttcaccgccgcctacctcaagcccgccgacgtgctcttcaccaacggcgtcaccgccgggcagtatctgccctatgtccagaccctcatcgacggcctggaggccgactgcgccgcccagggcatggagttcaactggttcaacaccgtggacggcgtgatcttcctggactatgtggaggacaccgccctggcccacttcggcgtcaccgccaaggacggcacccagctctacaaggacttcgacatgcaggtgtattacagccgctatctggatcagaagggataagctccgggcgggtgtgggcacccgcccctacaccctctatacgcccccttacccgtaggggcggcccttgtggccgcccgtgtcccacataggggccgatgcccacatcggcccgcctccgggcggggacaagccccgcccctacgttctccctatacaccccctttcccgtaggggcagcccttgtggccgcccgtgtcccacgtaggggccgatgcccacatcggcccgcctccgggcggggacaagccccgcccctacgcgtgagcattgaacgaggggagcagcggaaagcagccgcgctttgtaggggcggcccttgtggccgcccggctggccggagcctgggacgggaatgaaagaggcgggcgggtgtgggcacccgcccctacgtgtgaacgttgaaacgggggagcagcggcaaccagccgttctctgtaggggcggcccttgtggccgcccggctggccggagcctggggcgggaacgaaagaggcgggcggggacaagccccacccctacgtgtaagcgttgaacggggggagcagcggacatccgtccctgtatgtccacatatttcgggcgcggggaaggaaaaggaaaggcggcccaaatgggccgcctttggcaaacaactcagaacttgatgcgctctgcgatataattcttgacctcgctcatggggatgcgcacctgctccatggagtcgcgctcccggatggtgacgcagtgatccgcgggggtggtgtcgtcgcccacggtctggaagtccagggtgatgcagaagggggtgccgatctcgtcctggcggcggtagcgcttgccgatggagccggtgtcgtcatagtccaccatgaagtcgcgggccagctcgtcccgcagctgctgggcggggccggagaggacctccttcttgctgagggggagcacggcgcacttgaagggggccagggcggggtggaggcgcaggacggtgcgcacgtcgttgttgcccttcttgtcctggccgacgatctcctcgtcgtaggcgtccaccaggaaggccagggtcacgcggtcggcgcccagggagggctcgatgacataggggatatagtgctcgttcttctcctggtcgaagtaggtgagatccttgccggagtgctcctggtgctgcttgaggtcgtagtcggtgcggtcggccacgccccacagctcgccccagccgaaggggaacatgaactcgaagtcggtggtggccttggagtagaaggccagctcctcgggctcgtggtcgcgcaggcggagattctcctccttcagacccagctccaccagccacttgcggcagaactcccgccagtactggaaccactccagatcggtgcccggctggcagaagaactccagctccatctgctcaaactcccggatgcggaagatgaagttgccgggggtgatctcgttgcggaaggacttgcccacctggcacacgccgaagggcagcttcctgcgggtggtgcgctggatggcggggaagttgacgaaaatgccctgggcggtctcggggcgcaggtagacctcggtgctgctgtcctcggtgacgccctggtgggtcttgaacatgaggttgaacttgcggatgtcggtgaagtccgccttgccgcagccggggcaggtgacgccgttgtcccggatgaaggccaccagctcctcgctggtcatggcctccacattcacgtcgtcgcggccattctcggcgcaccagccctcgatgagcttgtcggcccggtggcgcatcttgcaggccttgcagtcgatgaggggatcgttgaaggtggacacatggccggaggccacccacacctcggggttcatgaggatggcggcgtccaggcccacgttgtaggggttctcctggacgaacttcttccaccaggcccgcttgacgttgtttttcagctccacgcccagggggccgtagtcccaggagttggccaggccgccgtagatctcgctgccggggtagacgaagccccggcccttgcacagggccacgatctgatccatggtcttttcggtgttcttcatatccataagctcctttttgcgttattctgcgcggaaaaaaacgccctgagccattcggctcagggcgaagcaagctccgtggtgccacctgaattcggggcagaggccccgcgctcaaacccggtaacggcgggaacccggcggggcatttcctccccacggctggcgggcgccttcccctgcctccgccggagccttgcaccagacggctcctctcttgggacggtgggacggggtacttctcccggtcaatgcctgtttctggccgctattgtatcacgcaaaccgcccgccgtcaaggcgtttcggggcctattccaccagaatcaggccgaaatggttccgctcctcccccaaaacccggagcgtgtgcacctccaggccgtgggcgcgggcggtggcaaacacgtcgatgccgcaggcctccatggcggggacggccttcccggggaagcggcacccctccggcgcgcaggagggacacagcttgcagggcccgctgccgaaggccagggccttgtagtacccgtccagaaagagccgcctggccccctcggcggccatggcggtggcgttccagtggtgaacccggaacaggatgccggtggaaaagctgtccagcacggcccgggtgcgggcgtagtccggggcctccggcgggcagcagtggtttttgccgaaattctcacagccgaactggcacttgaaggtggtccagggggcggtgaccaccgtgtgtgggtcgatcaccagggccggctcggccccgttctcccgcagatagtccaggcaggcgtccatgggcagcactcctctctgctcagagtgtatgcccgccgggggaaaagatcaagaagcgggggagacaaaatccacattgtgtgctatgatgtggataaaaaaacagaaggaggcggttgtccatggcgcgtccggcgattcgcatcaccctcattgaccggctgggaaagcggggctgccaccggggacaccgggtgggggagagctttgactttgacacggagcggggaaagctctgtcccatggccatgcatgtggcctttccctatgtggatattctccgctatggcggtgccatccccggccagccggcgggcacggcggtgttctgctgccccgatgtggacaccatcaatgtgtttcggatcgaggtgtcggacggggcggccggcccgggttagctgagaaagagctccacgtccccgatggtcaggccggtgtgaagggccagattgatcccgtatccgatgaccttcgccagatcgtgcacctgggtgtcgatgtccttgggggtgacgatcaggccgtcccccgcgccctggagggcggcggggtccagctcccccttgcccgcctcggccagcacgtcgcaggtgagggtggcggcgtccactacggtggggacgccgacggcgatgacggggacgcccagggtctcggcgttgagggcggcccgggcattgcccacgccggagccgggggtgatgccggtgtcggcaagctggatggtgcggcagacccgccggaggctgcgggaggccagggcgtccacggcgatgacgcaggcggggcggagggtttcggccacggcgcggacaagctcgccgctctccatgccggtggtgcccagcaccccggcggccagggcggccaccggccggaaggagccgaagtgctccggcacccgctccaccaagtggcgggtcaccatggtctggtcggcagccttggggccgatgttgtcgggggtgatggcccggttgcccaggcccaccaccagggcgggcgcgcccggctccaggcccagcagcgcccccagctccgccgccagggcccgcgccgcccggccgaaggcgtcctcctcccggcgggccaggccgtccagctccagggtcacataggtgcccaccggcttgcccagggcccgggcgcccgcctcgtcccggatgcgcacggtggtcaccggatagccctcccgcgttgcctcctccgactccacgcccggcagcgtcccggcctccccggcgctctcctgccagagctgggcggcctccagagccaggtcggttctccgtttcaacatatacgtccctccataccccaagatgtggtgttgatgacaccagatgcccctattttttgcgcagagcgcctccatatgcaaaaaaagtgaaaaaagttcaaaaaaagagttgcatttttaaagaatggctgttaaaataagaatctgcacgggcaaactgtgtaaataacgattacgtcatcggaggaggtgtttggtttgccgaatattaagtctgccaagaagcgtgtcctggtgaacaagaccaaggctgcgcagaacaaggccgctaagtccgcgctgaagaccgacatcaagaagttcgaggccgcggtggtcgaaggcaaccgcagcgaggccgagggcgcttacaaggtggccgtcaaggcggtcgacaaggctgtggtcaagggtctgctgcacaagaacaacgccgctcacaagaagagcgccatgaccattaagctgaataagctggcctaaaggtctggtcgaaggggagaccgtctgcatccgcaggcggtctttttcgttttttcgcgggagaaaacgggtatgctggaaaagagacgcgggggaggcggggaaggatgaaaaagctgctggagtggaagccggtccggtttgggctggaggtaggggagctttacttctccaagcgggtatcccgttcggctgcggagctggcctactttctgattctcaccttctttcctgtccttatctgcattaacgccttcatcggtctgctccatttggacatcaacgccgtactggaggccgcctcccccttcctgccccgggagacgctggggattttaggggactatattcagtatattaccggaaaccagtcacccgccctgctggccgcgggagggattatgaccctgttctccgcctccgctgccttccgggcgctgatgaatattatggaggatctttacggacgcaagagttatgcaggggtgtggcgcatcgcggccagcgtggccttttcggtgctctttctgctcaccatctacctggccctggtggtgctcctcacaggcgggtggctcttccatctggtggagcgcctgtttcgcctggaaacggtcaccctgccttgggactggcaatggttccgctttctgctgctgttcctgctggtgttcctttttgtcctgctggtgtaccggatggccgcgccccgaggcaggccacggccgcctatccttacaggtgcctttctggccgccgtagcccttgtggccgccaccgccctgttttcctggtttatcggcctgtcttccaggtactccctggtctacgggtccctggcctcggtgattatcctgctggtgtggctctacctgtgtgggaacatcctgattctgggaaatgtctttaactgcgtgtggtaccgccacaaaaagcggcgggtcacaggggagcggccgggctgaaaaaaggcggcgtaccgatccggtacgccgccttttttcacaggctgcggagccacagctcccgcagacccatcaattgaagatggggctcatactccaccgcccggcggagcaggggtagaatgtcacggccatgaccgccggtaaggactacggtgacggggcccagctcctcctccaggcggagggagatcccctccagggcggcggcggccccgtagagggcgccgctgcgcatgcaggacacagtatcggtacccagcagtccctcgggctgggtaaaagtaatacaagggagttgggcagcccgggcactgagggcgtccaccgacaggcgcagccccgggagaatcatgccgccccggaatacgccctcccgatctaccaccgacagggtggtggcggtgcccatgtcaaagaccgccagagggggccgccaccgggccagggcggccacgcagtccaccagccggtccatgcccaggttggaggcgtcatagtctccggtgggcaggccggggtcgagatcccgccccagcacccggacagggcggcgggtgagggcctccgccgcctggacggcgacctgggtgagggagggaaccaccgaagagagcaccactccctccacgtcttggggggccgctccctcctctgccagcagggttctcatgcgcgcggcgcagacggcggcgtccatgttccggtcgctgggcaggcggcggacaaagcgcagctccggcccctgaaagccgccaacagcgactgtagtgtttccaatgtcaatggtcagcagcatggctcaggcgggctcccgggcggccaggggagcgcggttgagcttgagagcctttcccatgggaatgcacaccgcggggacaaggatggccgccacaatggcctcaggcacaccgttggccgccacgatgcccagaataaagcccagcactgcctcggctggaatcccctgggccgcggcgtaggcatcccggaacagcagagcaatcagtcccattaccagggcggtgttggtaaaggcgcccaccacggcggacagggccatgctgccagcctggaggacggagccccggcggcgggacagggcctgaagcagcgtatagaccagccagggggtcacgccgacaaggatacggggcacaaaacaaaccaccagggcccaggggctgccccggtccaggcctggtaccggtatcaggggggaaaaggcaaaggaggacaggttgggtaccagggtatttttcaaaagactggccagaccaaacatgccgcccagaaaggctcccttcttgggtccgagaaggagggcgccgatgatgactggcacatggagcacggtggccttaatgatgggcaggtcgatcatgccgatgggggtgaaggtgagcagaaagagaatggcggtaaacatggccaggacagccaggctctgcacctgccggtgctgctgggcgcggggggtgtgggtgttcatattcaattacctccaggctgccgttcccgacgggcgggatacagcgcgtatttggatgcagccacaggcagagatgggcctgccgtctccctccggggagtacagcggcccgccgcccgggacagccgaggccattataacggttatatcctcagattgcaatcccattgtggaaaacctgcggctgttttggtataattggatgactatatacggagcataggggcggatgtccgcatccgcccactgacaaaggagagacctgcatgttaaaggggaaaactgtgctgctgggtgtcaccggcggcattgcatgctataagtcggcgggcttggcctcggccctggtgaagcagggggcgaacgtccaggtactcatgacccgaaacgccacggagtttatcggcccccacacctttgaatccctgacgggcaaccgggtaagcgtggacacctttgaccgcaactaccagttccaggtggagcacatcgccctggccgaccaggccgacctggtactggtggccccggccacggccaacgttctggctaagcttgcccatggcctggccgacgatatgctcaccaccaccgttctggcctgtgactgtcccaaaatcgccgcgcccgccatgaacacccgcatgtatgagaatccggttacccaggataacctggccctcctgcggcggtacggctgggagattgtggagccggccagcggacgcctggcctgcggggccgtggggaaggggaagatgccggagccggaggagctgctggagacggtgcttcacgccctctcccatgccaaggacatggagggactgaaggtgctggtcaccgccggccccacccaggaggcgctggatccggtgcgctgcctgaccaaccactccaccgggcggatgggctacgccgtggcccgggccgccgccgcccgcggggcggaggtgacgctggtgtccggccccacggcgctgaaaaagcccgcatatgtggagacggtggacgtggtgtccgcccaggacatgtttgaggcggtcaccgcccgcgccccggagcaggacatcatcatcaaggccgccgcggtggccgactaccgcccggcccaggtggcccaggacaaggtgaagaagggggagggggagctgtccattcccctggagcgcacccgggatatcctggcctggctgggggagcaccgccggccggggcagttcctgtgcgggttttctatggagacccgggacatggtggaaaactcccgcaggaagctggagaagaagcacctggatctgattgccgccaacaacctcaaggagccgggcgcgggcttcgcagtgccaaccaatctgctcacgctgatctccccccgggaggagctggagctgcccctcctcaccaaggaggaggccgcccaccgtctgctggatgaaatcctgaagctccgctgagccgaaaaaaccggcgcacccgtcagggtgcgccggtttttttcagctcagataggacagagggttaacagaggtgccgttgatcttcacctcaaagtggcagtggttgccggtagagcggccggtggagcccaccttggcgatgggctgaccctggtagaccttgtcgccggcggaaaccaggacgctggagcagtggccgtagtaggtctgcttcccgttgccgtgatccacgatgaccagattgccgtagctccacatgctgccggtggcccggccggcgaagaccacggtgccgccatcggcggccgcgatgttggtgccgtaggaggtggcaatgtcaatgccgccgtggtagctgtaggagccaaagatggagcggtagccgaagtaggaggtaatgcgcccgtatacgggccagataaagtagccgttgggcagccaggaggggcgcaccttggtgcccacagcgatgaccttgttggtggcctcccgggtgacctgggtagagagcaccgtgcgctcctgctccacgccgttgaggtaagcgatgtccgcgttgacgatctgctcgccggggacgcctgcatccagcaccttggactcgccctggtacatggagtcgtcctgcacctccaccaccgggcactcaatggactcggtataggtcacgttatccaccgtcttgacggagaggaagggaatctcctccttcacgttgaggagctggccgatgtagatacggttaatgtccacatccgggttgagggcctccagttccgacatgctcatgtcgttgtcaaaggcgatctgcatgaaggtgtcgcccttctgcacctcataggtggtctggccgttggtgttggcggtgagggtggccagcatggccgccgggtcctgattgacatcggagggggtgtactcgtgggtaatgtagaccccggaggtaaactcggcggacactgtgttttcatctacataggcagccttcacctgctccagcaccccattcagggtctcccgatcctgggccgcgccgatgaactggccgttgacggtgagcacatagctcttcattacctcgccaatctggtcaaagaggtaggtctcaaagtccgccacgggggtgatggactcccgctccgtcagggcaggggcgtaggtcaccgcgccgtccatggtatagtcgtagcccagaatatcggtggcacggctctccacccggtccaccacatcctcaaacacagaggggctggtgacggtgcccagggccacgccgtccacctccaccacatagctgggagtgtagacagtgcccacgacagccgccacgccgatgaccacggcggcggccaggaaatgcaggggattgatcagccggcggccgcccgcagtggcggcgtccagccggcggcggagcggctccacgcgctgcgccagggccgcggtacccgcctcccatctgtcccggagttgggccaggggcggccggatggccgaagactcctcccggggcgtatgcagaatttcgtccatgagggaaaccctcctaattatttgttcttgcgtaaaagaaggcccgcgagggccgaaaggtaacagtcagaaacgaaaagttacaaatggttacaaggcgtatcatacacgctttttgccaaaaagtcaagactttgactggaaaaggcgggaatccgcggcaattgaaggtcaaagcacaaccgacacgacatatagtgggcggctttcaaaaagatgtcctactactaccagaaggagaaatggtcagggcagagcagcaaaaagatttgtccactttgaccgggacgaaaagcccccacggcatcctttttggtgccgcgggggaccggaggggacgggggatctccccccatagccggaaaaagtccggagtccctgaaggaaactccggactttggagggttgttaggccagcgcggcggtgatgatggccatggagcagccccccacaggcaggtgcctgtggggcccccggcttttttactgcgcggggcaagtaaattgccccggcatcaaggttttgcgcccttgcgcaaaacgcttgacggcgcggagcgccgtgcccccggagtgggcggaggtctcctccatggccggaaaaagtccggagcccctgaaggaaactccggactttggagggctgttaggccagcgcggcggtgatgatggccatggagtagacctcctgggcgttgcagccgcgggagaggtcgttgatcggggcgttcagacccagcagaatgggtccataggcgtcaaagccgcccaggcgctgggcaatcttataaccaatgttgcccgcattaatgttggggaaaataaaggtgttggcatagccggccacgggagagccggggaacttgagctggcccacggtgggggagacggcggcgtcgaactgcatctcgccgtcgatggccaggtcgggggcggcagccttggccttggcgcaggcgttgcgcatcttgtccacagtgtcacccttgccagagcccttggtggagtagctcaggtaggccaccttggggtcaatgccgaaggttttggcgcacttggcgcactccaggccgatctccaccagctcgtcctccgtggggtcgatgttgatggcgcagtcgcccatggccagcacagtgttgtcgcccacgccctcgcggaccataatgaagcaggaggagacgattttattctcgggcttggtcttgatgagctgcagggcggggcggacggtgtcggcggtggagtaggtggcgccgcccagcagacagtcggccacgcccatctttaccagcatggtgccgaagtagttgcccttcatcagggcggcgcggcactcgtcggcggtcatcttgccgcggcgcagcgccaccatctcctccaccatcttgtccatgtcgggataggtggcggggtcgatgatctcggcaccccggatgttgaagccgacctcctcggccgcggcctttacctccgcctcattgccgatgaggatgggggccagccaggtgccggccagcaggcgggcgctggcctccaggatgcgggcgtcggtgccctcggtaaagacaatgcgcttgggggactttttcagggtgtcgatgagctgctgaaacatgtgaatggccattggtatcttcctccatcataaaaaacgtacgtcaaatgccaaaatgctcggcgtcggagctattatacaccatttcgactgcggttctcaatgcctaaaagccataagattgtgaaaaaatacactttactttttgtattctcacatttatactatacctactgttttgaagccagttgaagttgaggtgtgttatgagttccgatttttcccgctgcctttccctgctccggcaggagaaggggatctcccagcgcgcggccgcaaaggatctggggatcagccaggcgctgctctcccactatgagaacggcgtgcgtgagcccggtctggcctttgtcacgaaggcctgcaactattataatgtgtcggcggatttcctgctgggccgtaccctctcccgggacggcaccaccatcgccgccgaagagctgtacgattactccaccgagaaggacaacgtgctccacggctccattatggccacgctgaacaaaaagctgctggtcaactccatcggcgtgctcttcgacctgctgggcaagaccggccgcaaggaggccattaacgccgcggcggactacctgggtaccgctgtttacaagatgtttcgccacctgtaccgggcggatggcagcaagaacgaggacttcttctccgtgcccgcccggcagtttatggcgggcgtggccaccgccgacatgatctgtaccgaggcccagtatgtggacgccctggccgcccacgtcaaggagaaggggagcttcccgcccatgcacaacgacgcgctgatggagaactaccccggactgtaccagtccctgctccagattatccacaacaccggggagcgggtcaaccgccggatggagattcagaaccagaagtagggcgcggcatcccggacgcgccgcctgtttaccgggtacgcccggggggcgccaccggtaccatgcccttgaacggccggggcggccgcagtagggatatgcagagtatcgctccaatgtcaatcgatgctttcacatcttcggaggtgtatttttttgaccgaccagagcaaaatccgtaatttttcgataattgcccacattgaccacggcaaatcaaatcccgcggagtcggccgactccgcgggtaccccgtgttattttgcatcctcggcggaagtaaattccgccttcggcaaggttttgtccgggggacaaaacgcttggacgcggcaggccgccgcgccccgctgcgcggggttccgggtggatttgccgaagggaggagtatgccatgactgaccaatccaaaatccgcaacttttccattatcgcccacatcgaccacggcaaatccaccctgtctgaccggctgattgagaagtgcaacgccgtttcccagcgggagatggagagccagctgctggacaacatggacctggagcgggagcggggcattaccatcaaggcccgggcggtgaagctcaactatcaggctgccgacggggagacctatgagctgaacctgatcgatacgccgggccacgtggacttcaactatgaggtgagccgctccctggccgcctgcgagggcgcggtgctcatcgtggacgccgcccagggcatcgaggcccagaccctggccaacaccttcctggccctggagcacgacctggagattctgcccgtcatcaacaagatcgacctgcctgccgccgaccccaagcgggtgaaggacgagattgagaacatcatcggcctgcccgcccaggacgcccccgagatctccgccaaggtggggctgaacatcgacgcggtactggaggacatcgtaaagaatgtccccgcccccaagggcgacccggaggccccgctccgcgccctgatctttgacagccagtacgacgcctaccggggcgtgatcgtctatttccgtgtgatggagggtaccatcaagaccgggatgaaggtgaagatgatggcctcgggcgcgtcctatgaggtgctggagtgcggccacctgctccccctggggatggagccctgcggcgagctgatcgccggcgaggtgggctacttcactgcctccatcaaaaacgtgaaggatacccaggtgggtgacaccgtcaccggtgtggagcgccccgccgccgaggccctgcccggctaccgccccgcccgcgccatggtgtactgcggcatttacaccgaggacggctccaagtatccagatctgcgggacgccctggagaagctccagctcaacgacgcctccctgtccttcgagcccgagtcctccgccgccctgggcttcggcttccgctgcggctttctgggcatgctccacatggagatcatccaggagcggctggagcgggagttcgatctggatctcatcaccaccctgccctcggtgatctaccgtatcaccaagaccgacggcaccgtggtcatggtggacaatccccacaattaccctgacccggcggtgatcgagctggctgaggagccctacgccaaggtgtccatcgtctcgccgcccgactatgtgggcaacatcatgcccatgtgccaggagcgccggggcgagttcaaggacatgcagtatctggacaccaacctggtggagctgcactactccatgcccctgggcgagatcatctacgactttttcgacaccctcaaggcccgcaccaagggttacgcctctctggactacgagctggacaagtacgagccctccgagctggtgaaggtggatatgctgctcaacggcgatcaggtggacgccctgtccttcatcgcccaccgggagaaggcctacccccgcgcccggcggctgtgtgaaaagctgcgggacaacatcccccgccagctcttcgaggtgcccgtccaggccgccatcggcggcaaggtcatcgcccgcgagaccgtccgcgccatgcgcaaggacgtgctggccaagtgctacggcggcgacatcacccggaaaaagaagctgctggagaagcagaaagagggcaaaaagaagatgcggagcttgggtacggtgcagatcccgaccgaggcattcatggcggtgcttaaattggacgaagagtaagcatccgcaaagttccctcctcgcggcatagccgctgcggcctacgctacaaacgtgccaccggcacgtttgcttaacgctgcggtggcggttctcaagttggacgaggaatgacggcatcttctttttggcctctggggccccacaaggtggggcggcgcttgcgccgtacaagggtttcgccgagagcgaaacccttggcgcagggcggattcactccgcccgagcatgtgaaatggagagggggtccccgcgaaaggcatggctttcgcggggcgggcaaaaagaagatgcggagcttgggtacggtgcagatcccgaccgaggcgttcatggcggtgcttaaattggacgaagagtaagcatccgcaaagttccctcctcgcggcatagccgctgcggcctacgctacaaacgtgccaccggcacgtttgcttaacgctgcggtggcggttctcaagctggatgaggaatgacggcatcttctttttgacctctggggccccacaaggtggggcggcgcttgcgccgtacaagggtttcgccgggggcgtaggggcggggcttgtccccgcccgcaggcgggctggtgtgggcatcggcccctacgggagaagcgcgggcggccacaagggccgcccctacaaagaggatactatgagatacaaaaccaggagcacaccacagcggtgtgctcctggtttttgtttgatccggttttccacatgcgggaaggatcctgtggaaaacttgcgaaggcggttactcggcggcctcgtcctcctccttcttggtgcagacgatgttcagctcgtccagctgggcttgggtgacgaaggaaggggcgcccatcatgagatcctgggcgttcttgttcatggggaaggggatgatctcccggatggagtcctcgccggccagcagcatgaccatgcggtccacgccgggggcgatgcccgcgtgggggggcgcgccgtaggtgaaggcgttgtacatggcggggaacttggccttcacgtcgtcctcgcccaggcggacgagctggaaggcctcgatcatgatctccggatcgtggttccgcacggcgccggaggagagctccacgccgttgcacaccagatcgtactgaaaggcggtgatggacaggggatccacctcgccggcggcggcctttttcagaatctccagcccgccgttgggcatggagaaggggttgtggcagaactccaaaagcccggactcctcgccgatctcgtacatggggaagtccacgatccagcagaactcatagcgctccttgtccatgtggttggggcagaaggcgcccagcttggagcggagcacgcccgcggccttctgggcggccaggagcttgccggcggtgaggcccacgaaacagcccttctccagccccagagcggccaccaccgcgtccttcacgggctggacaaacttggcgatgccgcccacaatctcgccgttctcgtcgtagcggaaccagtaggccttctcgccggactgcacctccacgtcggcgcacagcttgtcgacctgcttgcgggtgccctcgaagccggtgaccaccaccgccttgacggtgttcccctcaaaggggccgaagccgcaggcgcccagggcctcagtggcgtcggtgacggtcagatcaatgcgcagatccggcttgtcggagccgtacttgtccatcgcatcccggtaggagatgcggcggaagggggcggtggaggccacgttgtaggtgccgtactgggcaaaaatggggggcagcacgtcctccaacacggcgaacacgtcctcctgatcggcaaaggccatctccatgtccagctggtagaactcgccgggggagcggtcgccccgggcgtcctcgtcccggaagcagggggcgatctggaagtacttgtcgaagccggaggccatcagcagctgcttgaactgctggggggcctggggcagggcgtagaacttgccggggtgcttgcggctgggcaccagatagtcccgggcgccctccggggaggaggcggtgaggatgggggtggtgatctccaggaagccgtggtcaagcatggccttccgcagggcggccaccacctggcagcggaggatgatgttgttcttcacctccgggttgcggagatccagatagcggtacttcaggcgggcggactcgtcggcctcccggctgcggttgatctggaagggcagctcgttgtggcggcagcggcccagcacctccaccgcctccggcaccacctcgatgtcgccggtgggcagcttggggttcttggagtcccgctcccgcaccacaccggtgatctggacggtggactccttgttcagccccttgaaggccttccacatggcctcgttctccacgaccacctgggtcaccccgtagaagtcccgcaggacggcgaaggcaaagttctggcccacctcgcggacgttctccagaaagcccgccagggtgacggtctggcccacgtgctccatacggagatccccgcaggtgtgggtgcggtaatgggtatgggttgtctgcatcaaaaatcaactccaaatcgtaatatagaaaggataaaatacaatcaggatagaaaagagagccatataggcagatcggaacgccaaaagagacgcggaggcgggccgatgtgggcatcggcctttacgggagacacgggcggcca

SEQ ID NO: 346 - DNA, 31656 bp, Flavonifractor plautii
  source 1..31656: mol_type = genomic DNA
tttcttcgttaaaaaagacccgcccaacctttctgagacaaaaatgacgccggccaaaattgcccacgaaacggtgtcgccggcatccccgcgaaactgtttcgcccggcctcgaacggcatatctgctctgccgatagctctggcagagcttgcatagcatagtgcatggcaaatttaacactactgagaggagggactctatgttctttctttggcaaaacaagccggcttcggtgctcagcagctccggagaatggatccccaagcaggagatccgcaaccgtctgaacgaggtccgcatcttcgccagcgcaggggaggccagacatgtccagcgttcccggtacaacaagaagggcgtctcagttttgatcgacaaggctttcaaagacaaagccaaactccagaaactgcctgtctgcaaggaggcggctgcccagaacaccgatgactgcttcgatggcaagatgtctacttacggcgagtacctggatatcctctgtgaaggtgtcgccgggcagaacagccggatcatctttccgcccgccaaccaggaactgacggcccacacgccgctcatccaggagatccaggagacgctgggcaggctggccgacttcatgtctgagctgaacggccatgagcagcggctctccaacgagatccggcagatcgacctgctggttgcagaccgtctccaccaggctgagatttttgagctcaccgatgaagagtcgcagacctttgtgagggagctgcatgaggctcaaatcgagcgccggcgccggaagaatgaactgtcggccctgatgtcctgcaaggaggtccttcggcaggtaaacatcgacgatatcaaacgcgccatcaacgagatcgagatgctgggcagccagaaataccggtgcaaggcgctcagcgagtctgatccgtttgtgcagaagcatgtgaaattctaggaaaggaggcccataaaattatgcccgaaaagaatgtaacctcgctggtcatcatgaccctgcccaagaacctggactgcctgattggcggcagaggcgtcgacccgtctggcggccgtatctgcgctatcttcgacgacggcgatttcaaggagatcccgatgaccaatgaggaagtcaggatcgagtgtcctaccgataaggagggcaatgccctggccaccgtcttttatggtggccagtcgcagatgttccaggtgtatgtccgcaagccggtcatccgcaagtttaccattgcaacgccgcctgcgaagaacagctacctggccggcgagaagctggacctgaccggcctcaagctgaacgccgagtatgagacgggggaaaaggtcccctatgagaatatcccagaggtcgactatacggtgaagtacggcgacgccgtctacccgctggctatggagggcctctcggtgcccatttttatcaaagtcacggaggcgaccctgaccgggctccggatgggcaaactgcccaataagaccgaatacctggagcgcaaggagaaattcgacccggccggcggcactatcatccagatgtttgacagcggcaccgagcaggagataccgctgccctactcagccgtccgcggcttcagcaacctgacacccgggccgctggaactgaaggtgcagatgggccagttctccaccagttttgaggtcaccatcgtggagaagaaggccgtgcgggtcagtatcgacactcagcccttccggaccacctacacggagagtgagccccttgtcatggatggtatccgggtaagcgttgaatacaacaacggagaatcccgcatctgcgacgagtgggactatgagcccaagaaggctgtgctcggccaggacctggtagtcgtcacggtgggggacgccagcgcaaccctggctatcactgtggcgccccggcagcttctgtccatccgcgtctgcaagatgcccaataagacccagtataaggagcggctggagatgctggatgtcaccggcgccgagctggaactgagtttcgactacggcgacccagagatcattcaggtacggccggatatggtcaagggcttcgataaccgccgggccggcgagtgcaaagtggaggttcagtaccagggcctggctgcagagttttcggtggacatcctgccgcagacacttctgggtattatgattacccagatgcctgaaaagactgactatgcaccaggtgaaagttttgacgccaagggcatggttgtctccgggttctatgacagtggcgtgatcgagccgatccgctcctacgctatcagtccggaccggcccctgcaggagggagatgtggccatcctcatctccagcgtcgataagacggctgtggttcccatcaaggtaggggagatgttccgcgtcaagcctgcagagccgcagccctgggagacagtcagccagactcctgacccggttgttcctccggccgaaccgcctgcgggagacccgccttccgggttccctgagacgccgtctgggttcaacgacccgttcagtgtatccaacaacctgtttggcggcgccagggagaaaagcccggcagctacgcctggttttgggttcatgcctcctgaagaggaaacgcccctgttcggtgtgaccagcaacaacatgaacaaaaagccggcccccgaacctgaaccggaggagaaaaagaagagcggtttctggggacggaagctgttcggacccaatacctccaaatttcgcggtgagtaatgatcctacagccaaaagcaggcccgattttcgggcctgcttttctttgcgcgaaactgtttcgctgctcccgaaattggatgcggcgcacctgcatatattagtcttagaagccaaatttggatagaaaaataatggagaaaattaagaaaaaggagaaatacatatgtttttattcgtgagtgaagcaaaataccgcggctatgctagggtaggtgtggagaactatgcttattgcacctgtggagctaagtttgtaccgaaggatgtcaacgagcagggaaatgaactctcccactgtgaggtctgttgtcccaaatgcggggcgaaattcggcaaccggcagaccctgtatctgcggagcagtgatggtcagtccaaccttgttccatactgcaaggacaagaatccaatgtatgaggtgctggtggaaggtgacctggtcaagctggtgaaggaagctccaaagggcgatctggcggattatgtcatcgatgggaagcccatcgaggtcatccgctatgtcctgaccttcgatactgcgcatggcctgcggcccgtcaaactggaggtcgatggccgtgagatcaacctgactgtgaccaacatcggcaaggcatgctccgggctaagcgctgcctccatatacattcctgatgaggcaaagcggttcaaggacgaaataacctggatccagattgcaatgggtcacacatcctctctggcagaggcagccaagggcctgctgaagtacccggtgttagactccctctatgaagagaaggaacgccagcagtggacgcatgctgcatccggattctgggcagctctggaggacgactatctgcaggcaggggagaggagtctgaaaaaggcatttccgctgccccggcaggctctggatctggtatttcgagggaaggtccggtttgggcacgcctataaggtcgttgaaaagctcggggacaaccttggcgctgagatgctcaagctggcaggagagatcctgaaagattcgcccaacgatgtccatgaactggcactgttcctggccggacgcaatacggttgaacggcagcgtctcaagatctacctcactgaggaagtctgcatctaccagggcattgaagatccgaaggcggcttggcacctgctgagggactatatcaacatgtctgaggatatgaatgttccatacaacctgtgtcccaagtccctgaaactgcgccacgacctggcagcccgtaaccataagctggtgctggaagaaatcgagcgcaagaagttcaaggagaaagcaactgcagagaactacgccggactggagtggacctccaaggatggtaaatgggccgtgctggtacccaaggacgccggagacctggtgagggaaggctcagagctcagccactgtgtaggcagctacgcaaaatatgtcatcgatggcagtatgcgcatctgcttcctgcgaaagactgagaacctggataagccgctgctcacgctctctgtcaatgcgagtgattgctgcacgacctacctgggcttcgacaaccgcgatgcggtggcagaagaggttttcgctctgcgcgagtggaccaaggctcgcggcctgactctctgggagaactaaatttcgatgtcgcacaaaaatgcccctgtctcctttggagatgggggcattgctttgtttgtttgagaaggactggcttgtcttttttaacgaagaaaagggcggggagattttccttcgccgggtggcattgccgctgaccggctccgttccggagccgatgttgggtccgtgaggtttcgcctttgcaggccggggcaatgttggatgttgcggacaaccatttgctccggtagcgtcagccgctgtgcggtttggagtaggtggactgccccagaatgggatttgccaggcttgcataggatagtccagatacccaattctggtgcaatctaaacttcaaggagacaaaattcatggaaggagcgtgagcgatgcgcaaacgcaatccgaattccagaaagcagaattccgccaagcactcttcccgcggcagcccgaaaaagctgaacaaaggcgattgccgttacttcagcatgggccagtgttcccattttcacgggaagtgtttcgactgcaaggaatatctgcaccaggccagctatcgccgaaaatccaacagcggtgagaactggcgtcatattatgtgacccaaacaaggggaaaacaattttttttaggaggtatatttatgtcgatgaatatctatcccttccaggagcctgcggcttttgccctttgcggcgaggcggccaagctcatttggaaacaggtcgcagatgaagatgatgagttcaacaccgatgaactcagcgacctgtggtgcgatctgttcgatgcccgttggtccaacagcttctgcggcgagatcgagtctctgttcccggagctcaccaagaatcccctggagcagagctacgatgacgaggagcttaccgtcattccctgtgaccgggaacctaagctctttgaggcggcttacgccaacaaggaagagcttctggaggaattcaaggacaagctggcggatgccggcatcgagatgccggaggacttcgactggtggcgctacatcgtaaaggtctctggcaccgatttcagctgaggagggaaacaagatggaaaacaaaaacataaagactgagtatccctatgccgtcgttgtccgctacgacttcgatgatgatgtgggtgtttatccctgcaaggatgaggacaaggcgaaggagctgctgaagcggttctttgaggctgaggtcgccgaagacgaggcgaatggccacgacttcgagtctgagatctctgacgacggctggtccgcttccatcaccaactaccggcacgatgggtcagtcgaccacacttggtggacgatcggcaacatttacggggagggggatgacttcgaatgagccgcaaaaacaaggcgctcaacgcctttaagaaagccgcccccggctactttgccgaggtcatccctgacggcggcggaaactggcacatctgcgccgcccgcgtggaccagcagactggccagaccctgtacgggaaggtcatcgcctcctacgcccggcggatgctggctgagagcatctgtgcgaacctgaacatggctcgccacgctgccggcctgtcgcctagctgagacggcaccactaaagccctgttcccttcgtgggagcagggcttgctcttttgtagagctcacggacccgacatcggttcccgtgagggaaccggctgaggtgagtggttagaggcaaaaaagagaaatccacactgcttttctccgttaaaaaagactggacgaaaccgtttcaccaagccacagagtgaatacctaaaagccgccaaatagctcccgaactttagtttggtgagagaatcagtgttgtacgcagcggccaactttccgcgaaactgtttcgcataaatcattttcttaggatttgcatagcatattgtgttctaaccaatgtaggaaacgaacaattcccagatttaaggaggtatttaacgatggtggatattgatcacctgctcgatgtcgatgaccttgtcttcgacaacaccgagactatccatagcgatcgttgatcgctttggaaccgatgcggcagtaggcaacaggagccggggcgcagccccagccctttgccggtccgagcacttgaggaaacaaaaatacgcctcgcatggcgaggctaacaaggaggagaaatacatatggtggaaattaagaaggagttcggagccgacactcaggagctccgcaagacgatttcggtcgatgtcaaggtcgagctgtcggtaaacgacatcttcaactggctcaccgactgccagaaccctgcggccctgcgctatctgggcaagtacgccttgcgctgtgccgagggcctggaaaatccggactatgacgacttcaggtccagagcctgacagggggaggagaataatatgagctatcatgttgatctttcctttacggcggtagagagccgcgaagaggcaatggacctcggcgttcggttctcccggatggtcgccgagtcaccctatgcggacaagctgatccacgacaacatccactacgccgcccgccaatgttacggcgacgaaagcgggaacgccctgagaggctggctgtacagccttttcaatgtgcggttgtggtactggccccagtacaagctcgctgccatcatcggcggcgactggcctgatgcctgtattgaggagttcggacttcagcgccatgagttccaggatggctgcgaccaggactatgagttcgagtcatggccggatatggaattcttccagaaggagatcgcaaaagcgaaaatgatggaattggaccaggaggagtacgacgggtgcgacgaaggttatgcccgccgttcggctctgtacaagaacatctatgacacccttggtctcctggactgggagctggacaaccagactatgaagttcgagcagatggccttcagcggcatctaccggccgattcagatgctcatgctttccacgaagacgcgcgcctacatgaggaagtgggacgctggcatgcgcaagctgatggaggacatcgacagcggcttcgaaaatacctgaaccacaaagccacgggaagttcccggggctttgttatacgagaaatccccgggccttgcggctccggggatttttacctgtgccgccgtaagaccccctgctttagctgcggggatatataaggcggcatcggtgaccacgaccttccgcagggaggtcgtgtggtgcgcaaatgctcgggcaaacattctcctcagatatagacaagccctccggttcgaacaatctggcagtcttttgccgggaaatttttgttccctgcgccgatagcacgatagtattgacccccagaaatctgcccactcaacacataccggcgaccctcatagaagaacaagttccctggcagatagcggccatttgtatatgcaggcttcggcggaactattccgcaatcatctccaggaactcctcttcggtgaggactgtgattcccagatcgtgggctttggccagcttgctgccggcgccgggcccggcgatgacataatcggtcttcttggacaccgaagatccggccttggcgcctagctcctccagcttcttgttgatgccgtcccgggtgaagtgctgcagggaaccggtggctaccaccgtcttgccattgaaagggttgttcgtggcagccgttgccttgggggcaaccttgaaccgtacctccttggctacatccagtacctcctgacggctctcagggtccttcagccaggcgaccaggttggcagccttcttgggccccatgccctccagagagtcaaagtcgaagccatcgtccacggccttgagcagcgcatccagggtgccaaactgtttctccaacagcttaccgatatggcggccgatgagcggcgcaccgaaagcagccaggaaggaagaaaaggccgcgtcgcggctggcctccacgccatcctgcagcttctcataggaacgcttgccgaatccatccagagcgataatctgttccttgtagcgatccaggtgatagatgtcggcgaaggtcttgatgaagccatcgtccaccaatgcctccagagtggcgccggccataccggacacctccatgtaagtccgggcgcagaaatgctcgaactggcggacgcgcttggccgagcaccgggagttggtgcaaaccagatagttagtctctccacgctgctccactacggccttaccgccgcagcaggggcaggtgtcaggcagcttgtaggtaccagacttggtgttgttcttggccacagctgggatgatcatgttggctttgtagacctccagctcatcgccgatgcctaactgcaacttgcggaagatgtccacattgtgcaaggtagctttctggaccttggagccgtcgatcataaccggcttaaacatagccgtcaggctcaggataccgctgcgggtcggctggatgcgcactcctaagaacttggtcttatgggtggcgtcctcccatttgaaggcgatgcggcagttctcatggtggccggtggcccccagactcttgccgaagaccttgtcgttgtattcaacgattagcccatcggcgggaagtggaaaggtcttgacatcaaagagcttgtcgtcaatcacctggccgggtgtcttggtgagcaggtgcggaacgaccgagaacccctgctcagccaggaaagcatagctgttctcaactgtgctcaggaagggctgcaccagctcaaaggccacaaactgcagctcgcggggagccgactcacgctggtttagcagccggacagagccggcagccaggccgcggggatgggcatagggctcatccacacgcttattgacctcatcgaagccggcccaggaaacgacgcactcgccgcggacctccacatcatccgtgcagggaatgtactgggggatacccaggatggaggcgcagttgtgggttacatcctcgccgatattgccgtcgccacgggtgatgatacgctccagcttgccgttggcatagcggatgaccagggtgagtccgtccaatttccaactgaccatgcaatcaccgggacccttgcctgcaaacttatcgatgtcctcagtgctctttgtcttggccgccgacagcatcggcttggagtggataactttaggcaagctgggcaggatgcctccgccaactttttgggtgggggaggaggcatagatgatgccagtctccttctccagggcagccagctcgtcgaattgggagtcccactcccggtcgctgacgatcggatcgtcattgaggtagtaggccaactcctccttcttcatgatggccaacagttccttcatgcgattgatcttgttctccatagtgttgtttcctcctatgtattttagtttagccaaatcgggtggctaattagaatatatgcaaggaagcggaaggccattctgggatggggaacggatggtcaagtcttttttaacgaagaaaatcggcagagggatactttgtactgcctaaactttagcagcacgagcttccaggggagctcgtgtatggtgttcagagcactcacggaccacaggcaaagtgactccgcctgttggaaaaacatgaaattcttagtgaaagacacaaacctaaaacatacatggaaaccgccgcccccatatcgggacggcggttcttttgtgttacccgcaatttgatgcgggcagcgcaaccagctgtggagggagggacctggccacatcctcaaaagttgggtactctgtgagtggaactatctttgcaaccggtgttttttgcgtgactggcacagcttggcaaaggtcaaacaagagcagccggtgagaggaatagaatacgcctttcaccttcatcgctggaaggccttcccagcccatcgtcatccgtactgagtcggcaagagctttgttccccaaggaaatgcgcttctggggccggctgctgtcccgctcatagaaggggagggacaactcctgtacggtccgaagttccgcctcggagaaagccttgaggacgatttgctgcccatcgtaggtagagcatagacagacatgggttgggtagttgagttcgatgattgcggcctggttaaaggacaatctcctggagaagatacgcaactcagaggtagagtaggagatcagcttcgggttcaagaccctgaactggctcggatcaaagtcaggaaggaacgatggatttcgatgtagcatatctatgttttcctccaatctcgactggatacacccgcaaatttggctcgattgtgatgctgtagtcggtccgcaggaagtctgtccatacggtagaaaacaggatgcgctggacttcaatccagtcggtctctgacacgagttttggatgatagtctatgatttcgtatttggggagctgccccctgtttttaaccgatttgtgggaaaacagatcctggacgaaagtcttttgcatggtcacattccctgcataccgctcgttggataggatatagaggattgttgcatgagaccagaattccttcccctgtggagaggggatatggtatatatggagcaaatctcgaatctcagaaatcgaatagcgcatcagtacccatccatatatcatccgcacaacatggctggtgaccgggtcttcggccaaatcccgcccttcccgcaagtatccgtacaaatccacgatgcggggaatgccgcgggcaaaccgtttccggattccccactttactgccagcgatttggtttcagactcagactgggccagcgtggatagcaggttgagctgcagctcgctgttcgacgccagcgtatgcaggccatccgtttcgaacagtactcccacaggcgggttcaggtttttcagcatccgacaggtggaaacgcagtctaccgtgttacgggcgaagcgggtaaccgacttggtgagtactaatgagaccttcccggccttacagtccccaattagccggttgaagtctttgcgtttcttcatggaagtagccgagatcccctcatcagcatagacatccaccagtgtccagtgcttgttctgcgcaaccttgtcctcatattcctgccgctgcaggtcgtagctctcgacttgatcgtcggacatcgtggagactcggcagtaggcaccaaccagctcgtccttctcacgaatatcaatgcagtactcttacttcgccggaatcacccgcacctcatgagcgtccagatcctcatggaaccgcctgcgccgttcttccctggaactgcccaacctaaatcacctccaagccaccgtctgccggaggaatatctacacggcccatttccagcctaagttgttcgatcgcccgccgttcctgccatcgagggaagaaaaaggccggcgtaaaccagacattggaaccctgcttttgcaggaggggagacacgccggagagcggctgtgtcaaactgttgtccacaacaatgtagcctggacagccgagaaggctaagttggatatagcacatgcaggccgccagccggtctacatcctgggcggcaaacaagacgctggtttggaagttgatactcggcttctgtgtccggcaagcattggcaaaggcgaccagcaaggcgccagcaccgcaggctggatcatatacagaaatccagccgtttgcctcaattttttccttcaacctatccgaaagcgtcatttcagccatcatcttcgcaatgttgtagggtgtgaagaactgtcccttccaatggtcgttcagtcccagactcatgaacactgtccccaaaagatcctgctgcggatctgtctccagcccaagtactacctgcgaaaaagcctccacgaacaacccaaattcatccgctgtgtatttcgctgagatggaagtgtacagttgctctcgctctgcttgggcaggtccaaaatctacgctgttggcaatcgagattgccgacatcaggatgaaatcctcccagatctcccatatggagagcttcccggctccgagctgttccaatagccgcacaatctgttcctggtgacggtttttcagccacattctgcttctgctcataattcctccccttgcgcatttcgtcccctatcggcatggcaccatgccgtttttggccccatgatagcatggcaccatgccaaatgtcaaccttattctttttgtgatattgccgaaaattgtttccccgtggtataattagacccaaattttgtgtatagaaaggggatggttggcatggctgcgagcgagaaaaaaagaaaaagcaataggagatatctggagaaatgcgatttaatcacactaaaaccgcgaatagaacgcgggcaactgatcagattggccgcatcagaatctggacaaagtctgcagggatacatattagaggcgactgagcagcggatggagcgggaagggaaaccggtctggtcagcaggagatgaacctggcgagcggtaacctatcggacgaaatatattaacagggcggctgggaaggccgccctttctttgttagggaggtttgattgagtcttttttaacgaagaaatctggtggggctgtttgcttttccagatggcgtcgttgtgggccggctccttttcggagcctatctatggttcgtgagacctgctggcaacaaaacgaaacgccttccccgaagggaaggcgttttggatgtggcttagtccctgaattcttcctcgggcagatccccgtcgtcggcgtctgctccaacggcggcgaactcatcgccgaggttttttgactcttcttcaagagtcattgcgggctctttgccctggggagcagcttggcgttcagcctgctccgcagaacccttcgagcccttgcccttggcgttggagaccagccgatcgatgtcgtccttgtaaacgacgaactggctggcggccagaccgagtccgatgaggaatcccccgtgagaagccccccagtagtagaggttttcaaaaacgatggatccgaccaacactgccgcaaagccgagggtacaagaaacgagggtccgcttgatgaacttcatcttgcggatactctgccccatcttatggacgatttttttcatccctttgaacatttttctatacctccttttattatgcccggtctctctcgggctccggctcgcccttctccttgccggagtttgcgagtctgacgatatctccgtagtggacagctatcgaagtgacagccatcgacactacaaagatggggaccctcatccctacgaagccgattgccgctttcatgattccggaaatagcccagagaaccacgaatgcgcccaacacggctacaattccggaagcagaccgctgaagcccgcctccgttttttccacctttgcccgtacagacaccaattaagatggctgtcggaattacacaccagagcgtgtaattggtgaccaaggtgtacacgaatccgaggattcctgttaacacacctaccatcacataggtgagcgccgtggagacagctccaatcacaaggatgcggagcagaattggcagtttgcggatactgccgttgatgagggtaagggccgacatataattgcctccttatgtattttttccccattgttgcgccttttggcaagcgcggcctatgttaacatccctaagtggaatggaatacttaatcctatgcaggtacgctgaaaacaattctaaacaaaaagccgcctccagaacaaagaaaagggcaaattgttgcaaacaacggcaggcccacatcagacagatgaagcggcatgcagaagcctcacggacccggcatcggttccggcacggagccggctcgggccgctgcttccggaaacaaagctgacctccgccacatttcttcgttaaaaaagatatcttcgccgaacctcggaccacaacactcgggacagcttcccggccctgcaccaactcagtagcaaacaacaaaaagaatgccgccccacccgggacggcaaatttcttcaaattcgatttagccacgatgcagcgccatgagcagctgtttccgcgcctcctcgcaggattcagccggcggcagccggaacagatagcccaacgcgtcgttccaaccagccagcgattcggcatccggcttcaaccacatcacagcatgcgagattctgattggctcttcctttgccaccgttggcagatcgctgattcggcattcggctttgtgcgccagaaagtctaaaagcgagacttgaatgatcatctccgggaccggaggggaaatctccctccggggcacctccttttcccaaaatgttgcccacaacgagcagagaaacaaacatactgcttcatcctatgcaaaaacacagaatccatttccgcatggcatccctatatctaggtccaatctgcacagcggccacaagcctgtaccaccaaacaaaaaagccgaccccggaagcatctctggggacggcagtgagactatctgggtgacagcttagcaatcatctggtgccaggcctcctcacaggactggaccggcggaatcccgaacaggtagttgagcgcatcattccaattcctcaaactatcagcctgcgtctcgattccgagtacggcatgcaggatcctgctcggatccgttttcgccatcgcaggaagatcgctgattttgcagcccgttttgtacgacagaaaatccaacagagatatttcgatgaccatcatattcccagatgagagcgacgctccatccagacacctcccgaaagcctattcgttgccgcaaacggcggagcaaaacacacgatgactgccaatgcttgcacctcgtcggtactataccttgggtttctcgatccgctcgcggtttgtgccacttcctcgcatgatcacaacctggttatccataacactggacctccccatggttggctcaatacaggaagttctggtcgttgctggtaccagagaaaaatccggcaaaagatgggacagaaaacatgagccggctcaggatgctatcccgcgtaatggtgccgaaaccgcgggaatcgtaggaattatcccggttgtcgcccataacaaaatactcgccctcgggaacgataatctcaggcatatcccggtacatggtataggaaggatcagtgttgaatacaacatagggctcatccagagcctcgccgttgacaaaaacaattccaccatccaaagagacagtatcgccaggcagaccaatgacccgcttctcatagtagactttgccacccgtcaaaatagatgcctgctcggtgggattctcaggcttgaacagtacaatatcgccacgctcaatgtcggatacaacaggaccgtagagggccaggtcaccaaccgacaaagtggggaccatggacgaagacgccgtataggcaaacttgaagttgggtcgcagaacaccgaagataacaaccagaagcaggatggtcgcagccatcatggcataccacagcttggtctgcgccttatccaggtcagcccgtgtatatttgttttcaataacatcgctgccctgcttgacaacgataaactcattcatatcaacattctttttcatagctagtctttttcctcctactggttttgctctctggattcttttcccgttcataaaacttggccgttttgcacgaccgtcctccttccgatgttggcaaaaacaatcaacgaactcgcaaaagaagagaacgcattattcgggatgcaataataaactgcaggctcattgcagcaaaaacgatcagcatcgcatgggtgccgaagaaaatatggattaggaaaagggatgcaagaaaccaggcctccgcacggggacgcaggtcagcgccaaaagcctcgaagatgatcgccaaaaagggcataccatccgccttgacaatagaacgctcaacatagaaaataaagagccaaacagccaacattccaaaagtaaactccattgtttaatacctcctgttaagacaagtcctttgccctgggccgcaaggcaactactgtgaagctcatctgcatgaacagccaaaaggccatgatgagcatgggaacaaagccatacatgcaatgcatggcaaacaagacagccattacgacgccatcgaagaggatggataggtgcatgtactccgactggaacaacagggagatgatcatcttcccatcgtccattgccccaaaaacattgcagccggcaaagaacacccagcagatgaaacccaatacaccgatctccatggtgaaacctcctttatgaacgctccgcatcttggcgaagcaggtaatcttcttgcctttcactattattatatgcacttctccgttttcatattttcggagttctcgcggctccgaaaaagtccccaataagggaaccggccagcagtgatggccactcggcagagacaaaatcccccgctcttttcttcgttaagaaagatgccttcccggatcagaacaaattgtcgcaaaacaacagccaaatccgcagaaatccggcccgcatataatatgcagacaatttgcataggatagaagacatgaaaggaggcgtttggattgagcgaccttaaatttagcttggacgcagaggatacatccctactcgcccaatatgccattggggcttccttgagctcagaagtccgtgttgtccgcaacatctaccggaacagtgagaatggctacagcatctacgacgcagaagataccgactaccgtctattgaagctcagcggctattttccgacgcccctgcgcctggatgggtactacaaggtccgaggcatcgtcaagaagggcaaatatggccgcaccctgcaggtagatgactacaagagtgcgctgcctgaggaccaggactcagttatcacaatcctgcgtactctcccgggcctggacacccgggcaccggatgtttaccgggcattggggcctcaggcattggggctgatcatggattcacctgagatagttgcgaagaagattccgggcgtcggcgtcagcacggccatccgctggcagcaggcactgaagggtttccgggaggacgatgttgtgctgaatacgctgcaggagtaccagatccctgcctcagacgccagccggctactggagaaatatccagacatcatccagcggctgaagacgagcccttacttcttggctgatgagatcagtggatttggcttcctcaagtgcgataagattgccctagagaacggctatccgcctgatggtctggaacggctggagcaagcgatgctccatgtcctgcagcaagactgctggcgcaatggcaactgctatatgcagagcaaactgttctctgagcaggtaagccggctggtcgatattgagctggattacaaatcggccatggcaatcgtccggggtgaaacagagcctccgcttggtatcgacaaacaggcacttgccaacgccctggcctccagacgcgtccatgcgggacatggattccggttcccggtagtcaaaatccccagcagcgctctgaagatggccctgggcaccctacgcagctccagccgcatcatcgtggaagaagaccgtgtctacctgggctatctccaccaggctgagtcgatgaccgcccgctgcctgcggacaatggccgcctctgaatatggggacttcccggatgcggagggggtactggagcaggtctgcaccgcagagggcattactttggaagagaaacagcgggaagccgttctccgggcttgtgcccaccggggtggcgtcctggtattgaatggccgcgctggctgtggtaagacatttaccctgaacatcattataaaagtcctacgcgagctttacaagcggcaggggctgtcttttgaggcccaggtcatggcgcctaccggccaggctgcacaggtggcccacaaagccactgggctgcctgccagcaccatccaccgggccctgcatatcgtcattgacaaaaacatggagactgacacgatgatcacctgcgactgtgtggttatcgacgagttctctatggtcggcatcaatctggcgtccattttgctctcttctatcgccggcggcactaagacgatcatcatgggcgatttccaccagctgcccagcattgacccgggcaatgtgctcaaggacatcattgagtctggggccatccctgtggtcaccctgaatgtagtcaagcgccagggagccggctctggcgtcctccataacgccaacgccatcctggatgggaatcctatcagatctatgaaggtcaatgacaaaagcgtcaaggacaacgcctatatcttcaagagcgatgatcccacagccgcccggaacgccatcgtttcgatggtggcggctatgaggaagcgcgggtaccggctgcaggatatccaggtcctgtgcccgcagaaacagactgatgtaggtgtgcatgcgctgaactatgctctgcagatggcgttcaaccctcaggctgagggcaaggctgaggttttcagccagagggtgaccatccacgatgaggatggcgagctgaagacggtgagcctgatgctacgggaaggcgataaggtcgtcaataccgccaacaactatgagatgaagttcttcacctggcagaagggcgttggtttcaccgaggatttcagccgcaaggggatcgtgaacggcgagatgggcagggtggccaaaatcatgaaggtgaaggacggcaagacggtacggcagcgggtctatgtgcaggtgtccagcggccagtttgtcatgtatgaagacaactgggacgacctgacgctggcctatgccatgactatccacagggcgcagggcagccagtggcccattgtcattgctcccattatgtcctgtaaccggtcgatgctcagccggcagattctgtatacgctctatacccgtgcgcaggactcgaccgtgctgtatgggacgcagggttctatccagtatgctatcaacaatacctactcggccaagcggaacacctggctgcaggaacggctccgcagtgcctgaccgaaaaattgaccccaccccccagagcgcaactctcggaggtggggttcttcttttgctgtttttggattagttgtctaagtcttttctaacgaaaaaacggcagggattctttcgtcttccggaggctgtggcccgggccggctccgtttcggagccgaatttgggtccgtgaggcctgcttagccggcagctacgatggtcccaccatccggcgccggcgcggcagcgggcggcgtgacgatttgcggcaggggagggaggggctcgatcgtatccacaggggcgcccagttccgggaagcccttctggataaggtcgttgagacggaccatgatggttgcggcctgggcgcggctcatcagcgtatcaccggaaaaggtgccgagctcatcggtgccgacgagcagcccggtagccttggcggccgccacggcgccctggtaccgctgagggatcgactcccagtcggccgtattgcttgcagcggcgttcaggttgggagagatgttggcgccagctgcccgcatggcattggacaaaatctgcgccatctcatagcgggataccggctggctgaccatctcctggctgttgtgctgggtgcggatgtcgacgcccacatacagccccagatcattggcaactgtgcaggcagccttaaaccaggggtcgccctcagatgtctccgcctcctccagcttttcggcaaagaaggctcgggtgatcatctgggacagagcggcgtaggtgacattgtcggcaggcccaaatcggccgttgccataaccggcgatccagccgttggacgcggcctgggagatgtagctatgggcccagtagttttcggggacatcgttgaatacgggagtcgtggccgccagaaccggcgtcgaacagctcaagagagctgcgatggacatgaggccggcagccagggttctggttagagctttcatgatagttttcctcctttgatggatttcgcatctgattatattatatgcagactgaactgaacatattttgcgaaaaggcaaaactcaagccctgggagcggacccagggctttcccaactggcttctaagcctcgactttttcaaatgtagccaccgtggccaggaaatctgccgtactgagacggcacttggatgctgcgatgatgaggggaaggttcccctccaggtacagctccacgcaggtatcgatcctcgccttctcttctgccgctctatggacatcctgcagcagtttttccagcgtcatgacaacgcctcctatctggggttcttctgattatattatacccctgtctggggccggcggcaacggggttcgacaaacttttccggcagttggcgagatctgtatccgacgattagcggccgctcgcctgcatagaatgggtcgtctccagtttgcatactatttgtttagaccccaattttggatatatgcaagttgaaggcaatacatagaaaaggaggagacacatgattctcaaattcaaaaccccgcaggaaccagggacccacctgcatatctgcagggacggcgctaactggaccctgcagggtgtagatggcgccatcgaacaggttgtattcaacgaccgcggccttggactcgacaagtaccgcgtcatcgtccaggaggatgggcgttcggccatggtgatccgctttgcggacctccaccggcacagcgactactccctgatggacggcatgaccacggtgcctgagatggtcaagcatactgagtatgctggagccctgaccgaccatggtaacatgtacgggttcctggaacactacaaggccatgaagaaggctggcaagaagccgatcctcgggtttgaggcctatcaggagagtctgaccggagagctggatggggcgcacctgatcctgctggccaagaacttcagggggtatcaaaatctgttgaagttgacttccgaggcgttcgaccacttctaccgcaagccccatgtgacatgggcaatgctggagaagtaccatgagggcgtcatcgcaacctctgcgtgtctgggcggcattatcccccatgcactggaggatgggcaagacgacactgccgagtatgcgctcaagcagctgctcaagatattcggagaggatttctacctggagattcaacggcacggcatcaggggcgagtctctggttaaccagaaactcattgctctgggcgcgaagtatggcatcccagtgatcgccaccaccgacgcccactacccgactaaggaggataaggcagctcacgagatcgaactgtgcgcccagaccaagaagaccatgtctgagccgcacttcacctttgaaggctccggctaccacctgcatacctctgaggagatggaggagctgttcgccgatattccggtggcactggacaataccctgaagctggccgacaagtgcaatgtggaactcaagctgggcgatgtgaacctgcccaactatgagatcccggcgcagtttgccacgcctatggactatttccggcatctgtgcgaggaggggttccagacccggtttgccgggaaacctcagttgaccgaccctgtgtatcaggaccgcttcaactacgagatggcgatgattgagcagatgggctttgcctcctacttcatcattgtttgggacttcatcaacttcgcacgcaagaacaatatctatgtcgggcccggccgcggttccgccgccggcagcctgctggcgtactgcatcggcatcaccgacatggatccgattcggttcaacctgctctttgaaagatttttgaacccggagcgtgtctcttggccagatattgacacagacatagagcattctggccgtgccaaggttatcgactacatcacgaagaagtatggcgccgaaagcgtctgccgcatcgtgacattcgggacaatggctgcaaagatggtgctcaaggatgtggctcgcgttctgggctatccaaccggttgggcaaactctttggccaagctggtgccggaagaccccaaaatgacgctggtcaaggctctggacaagaacccggaattggccgcgagggcaaaaaatgacccagatgtggcaagggtaatggaagttgctatcaagctggaaggaaacaagaggcatgcatctcagcatgcttgcggtttggtcatcagccctggtaagatcaccgatttcctcccaacctctctggaaaaggataaggagaccggcgagcgcagcctgaccgcccaggtcaccatgactgaggtggaagacctgtcgctcatcaagatggacctgctgggcctgaaaaacctgacagctatccatgaggtcatcgacactatcaagcgtacccgcagcattgacacgacatacgaggatctgccgctggacgaccgggagacctacaagatgctctccaagggcatcactggaggggtgttccagctggaaggcggcggtatgaccaacaatgtcatcattccgatgttcgatgatattgacagtctgcctgagtccagactgcacgagtgtttcgagcggctcatcgccgctgtggcgctttaccggcccgggcccatggactacatccccaactacctggaggggatgcgggacccagcttccatccaatacctggtgccggagctggaagacattctgcgtcctacctatggggttatcgtgtatcaggaacaggtgatgcagattgtacggaaactggccggatatacgcttggccgtgcagattcggtccgtaaagcaatgggaaagaaaaaacacgatatcatggctgccgaaaagctcgtgttcatctacgggaacaaggctgactatgacgcaggtaaggataagaactatgcccctggctgcgtggcgaatggtatccctgaggcgattgctgaggagatctgggcgcaaatggaaaaattcgccagctacgcatttaatagatcccacgcagcttgctatgcttggcttgccagcatcacggcctacatgtcctgccactgggcacctgaattctattgtgcgatgatgaacgcatttgaggatgtgggcgacaaggtgaagggatatatggccctggcagttcgccgcggcattaagattttgccgcctgacatcaacaagtcctcggaccgctgcatggttgaggatggctgcatccggctggggttccataacctggcctatctggataagttcagccatctgattgccaaggagaaggccgacaagggccagttcgaggatttccaggatttctacgagcggatgagcgacctcggcaagaagccaagtaagaatattctggagtccctgatcttttctgggtgcatgtccagttttgggctaaatcaccaccagatggtggagatgatcccggttctggaaaaagactacaagcagagcatttctgttcgtcagctggggcagatcacgctcttctctcccgaagagatgaaaataaaaccccctgaggtggcagagtacagcgaccaattcctcatggagaaggaaaaagaagccatcggcttctacctgacccggcatccggtcgatgagttctttgccagtggcaagggcgagggctgtatgcctatcactgatttgatcgcagaggagcctgaccgctacagttcgacgcaggtctgcactgtcggtctgatccgcggtctccggactgtatacactaaggccaagaacgaagagatgttcttgttcacggctgaggaccggttcaatgagattgggtgtgttctgttccccaggaatgtggccgctaataagcaccggctgatgaacggagccctggtcaaaattgtcggcgagtatgtcgtcgatgagcagcgtggaccccagatcattgtgcaaagcgtgctggatgccaatgggacttcaaacactgagctgccaaccgtgactgtaaccattcgaaataaaggtgaacaggatgagctgatgaagttcgcccgtgaaaaccccgggacggcggtcgttcagatcatggcggcggggaagctgtaccggactgcccggtgcatcaaactgacccctgcagcgatggatttcctgcagagccacttcatcaaggtagagacctaatcgcacatctctgaaaaagaggagctgccccatgtgggcggctcctcttgtctttggggccatacctaaaagccgccagatagctcccgagctttagttcggtgagagaatcagatagactacagggctgaacgggaatacagaagaagagcagagcttttttaacgaagaaatgtggcaggaagagctccttctgccggaggcagatgctgcgggccggctcctcgcggagcctatgcggggtccgtgaggtgaatctccccacggctaaagccggggcttctcggaggatggcggccctggggacggatgaaagcaacaccccagcgttacctgccacagtcccccttgggaaccttgtccttgaggcccataacccggcgaccgatgacataggctgccgactcatggacagacagtacaagcaggcgcatgccatatccgccgcctgcacgaccggacacgccatgtccagccactcattgtagtgggcaacgatttactctgcggagccctcacgggcccaacataggttcctgttagggaaccggcttcggacagagactcgggcaaggcagaatttctgtgacgcatttcttcgttaaaaaagaccgtccagccttcagcctctagccaagacaaaacttcccgacatcgtagaacatcccaaattaagaaaaatagtcagcagaacatatccgggacatagccgaaaccaatccggacaaaatggaaataggattaaaaacatctgcatattatatttatgacgaccggggtatgggcaagcccgcatgacgccagaagccgatctggacaataaattttgcagtacctgcataatatttgctcatccccaaccccccgcatgtctgcacacccggccaacccggcgaatgggctgtaggcatcaaactaaaacaagcaaggagtgaaacaagcatgggaaacattaaaggccgggtagcagcactgccgttggcggcactgatgctcctgaccgcggcaggtccggtcacggccttcgctgcagatcaggccaagcccaacatctccgcggcatcgtacctagtccccgtggagagtacccaggcaatcgtcaatggggagatggtactggttgagacctacaaggtgcccacttccatggatcccaatgagctcattaaagatccgttcgagctccgcggttacttctttgaactgaattcgatcatcaaggaggactttgatgacgctcagacgaaggatgtgaccaaggaatactcggtagcagtcaacagcggagagctggccgataatatcggcatgcttcctgagacactcagctacgatgagggcaactggacaggtactctgtatccggttctcggttctgtcaatatccaagtgacagatacggcgaccagatccaagaccagttccactaccaagaccttcgatctgggggagttcaacgatccgactgccatccctgccacatataatgggatgtctcggaccagttacgacatccaaccaagcggttacatcgatggttcttcgatcccctccggttacaccgcaaccgcaacctacgccaagaagtcttactacaaggtcgacacagcctggaagatgactgccacctactccggtgtcgctacctacgatgagctgactcatttccagtacacgctgacctacaagggcgacgagatccaggacggccaggcgattgtggacggtgagctgatcacgatccccaagggctatgaggtcgttgatggccagcttgtgaagactggtttcgatttcggaagtttcttcggtaatgccggcattgtgctgctggttctggttctgctcggcggtctggcaactggcattgtatttgctgtcctggccggtatcaagcgcggtattttctacagccgcaagatcgtgatcgagtcccaggatgacaactctggcgagtacaccctaatgcagaaggtcagggtcaaccccaagaatcctgcgttcacgctggatgtcctgcgggccccctccgcccggcacttcaagtgctctatgtccggcggcctggccaagaaactgcgaggcacaatcatcaatgtgtccgccggcgaccaggtggttgccaagcaccgcgttgaacctttcaacgacaaagagcggtatgtgttcgccgtcagcctggaagatgtggattctgggcccatggacaccttctccctgtaatatcgttctccacgacaaggaggcctgcagcagcgggcctctttccttttgcctttttgccaatagaatttttcgcgcttgcataaattaagaacaacaacggctgccacaggggcagtggttggatatgtgcaggttgatgccaataaaatacatcagctgtgcatatatttgaaatagccgcaaaaatgtccgatgggttcctggcgaggactaatgcggcgccgtgcccgcagcccttccagatcgcctgttttcccatgcgcgggcggcctgtcaggggcacaagattgtagcaggagatttgtatgactgccgggaggcagccggtcctgcttgtgataggccagatggtctgtattccccaggagaggggaggtgaaatgaaaatgaagcgttctaaaatggcagcgttcgcactggcggccgctctgtcggtctcgatggcagttcctgctttcgcagccgggtatgaattctccgggctccagcctggcggtaacttctaccaggtgacggagcacgggcaggacaatgaggccaactctggaaccattatcgttggcgccgatggcaccatcggtacggatccgaccgccaagccccgcatgactcctctgaacgggatcgagactcctgtgggtgaatatccggactcctggggtatggcaacggacatcaacatcgcctacacctctgtgttcccgaactttttcgccccgcccagccaatgggccaacatcaagggcctggtgatcctggatccctatgtggtcagctctggcgccctgcctaccggctatcagatggccctcggctctctgtacggcgcgcccgtcttcatcgggtacatgccttgagttcaactgcagatgatcccggctgggggatgacgacctccccggtccagtctgcgtaactcacaaatttgctgctcaaaaagccgaacgaaaacccgcaagtttttaacaacgacagaaggaggacttttcaatgaagaaacgcaagatcgcgtccctgctgctgtcggcggccattgcgagcagcatggctgttcctgcctttgctctggagtacaactatgatgcggctggtaccggccagcagttcttccaggcgactgaggtaggcacagacgccgcggcagattccggccagatcgtggtcgggtctgatggcaccatcggcaccgatgaggcgaccctgcccaacagcactcccatgtccgtcacacagctgcctgttggcgacttccctgacggctggggtattggcacagatgtggccattgctcagaactctgtgttcccaaacgctctggcccctaccacccagtggagcggcatcaccggctttgtgggctatgacaacttcgacatcaattcgggcgctctgcccactggttatcagcagatgatcgagtcgctgccgaccttgtctgttgtgtcccctgtgtatgggctgcctggtgcagtaccggtctacactggcggcacctatggatactatgcctacaataactacctgtacaatcctctgacaggggcttactatggctatgcctccacagcaactgctctgacccccatgcctaagctgaacgataagaccagtgcaattggtcatctgagcattccggcggtaggcatggacaaatatatctacgagggaactggcgctaccccgctgtctaagggggtcggtcactttgattgtacgcctggttggaatggcaatatcggacttgcaggtcataaccgtggttataacggtagagctgctttcatcaagctgaaagatgttgaactgggagacttggtgtattacactactgcttacggtacacgaacctatcaggtgaccagtatcgatgctgtgtctgtaaacgacacctctggtctggcgcaggatggcagctacaagttgaccatgtacacctgcaaggccaatcagcctgagctgaagctcaaggtcgttgctcacctggttgcctgatttcggtagatagaatcgaaaaagaggagtccgttattgcggcgggctcctcttttttgctttatggggaaaaaggtgtcttttttaacgaagaaaacggcagagggtttatgtgggtttcttacagctgtcgttcgggccggctccgtttcggagcctatttggggtccgtgagagctttgttggggcgccggagcggcctcacggactcggcataggttccttatgaggaaccggcccgcggccacagcgtctggcaaaagaaaaccttcttgccacatttcttcgttaataaagacgaccagtggccaccaaggaacagcgctccaggtggtcgccggcgcagtcaattagaattcgtcatcgtcatcaaccccatagtcgtagtagccaccccgaccggcatatccgtacatagcccggcgttccctctcacgctcccggcgctgcttctggtagcagctgttgcagatagagtagggggaattcaggggaataggtccgccacactgtctgcagctggctccgcggctcttcaggtcatggataagcaggtagttgatctcctcggccaccagctctttctcgttcgtcagccattctttgtcccaagccagtccaaaattcttggagaatgagtagtagagatccaggctcttgtagaagagctctaggtccccaagccgattaccatcgcggtccggcttatccatggcagaagctccgccagcataggcacggcaatagatgccaaacaaagccagcaggtcggcgtccttttcatcgaagggaatactggccgcccggagtagatcttctttggagaactccagatggagggtattcaggatatagttgatgatggtgatataccgtgtgatgtccatgcggtaatagggcttcttcaccggcatctggttccagaccttcaacacatcaatgataggccgatcgaccttgagtaccaaatcagagaaaccaagggccgcagccttgacattgactggtactgtctccagcgtcttgcccaggtcatgctcacagtcgggcccagctgcggcaaagcccttgtcatagatgccgaaccgcccggcccgaccggcaatctggcgcacctcgcccggcttcaggggccgcatctcaacgccatcgtacttctcatcctgggtgaacacaacccggcgaataggcaggttgagacccatgccaatggcgtcagtggccaccagagctgtcgtatcaccatccaggaacatctgcatctggcggcggcgggtggcgtaggggaggttgccatagatgatggatgtgggcacgccgttatgccggagctcgtcagcaagctgcaggactcgcttcttggaaaaggctacgaatgcatcgcccttctgtgcctgggcgattttcacaggccggtccttccagataaggggcaccttgcgttcgtgctggatgatcgtgtagggctcgctcaggtccttaataagacactccaggatatgcaggccctcaggggccacgcacaggtggatctcagacgcctggatacccaggatagcccgcgtccacgcatagccgcgatcccggtcattgatgagttggcactcgtcgatgacggccacatcgtagcggcggttgatatccaacttctctacggtgctagagatatgggtggcgccagggcgtatatcctcctcctcgccagtgagcatggagcagataacgccatcgtctagcatccgctcctgcacctctagggccaggaggcggagaggagccaggtagacgccagtggcagcctccttgagccgctggaggctctggtaggtcttgccggtattggtgccacccacatggatctcaaaccgtcgctccatctgccgggccgcagggtactcgtccttgggatccactacaataagtttctctaggtcgcgggtaatggcggccggcacatagtaggtcagatagcaggtgtacagaccctcgttgacagggtagttgttgcgaatcgatttgaacgagaagatatcggccgtcggctcagtgatgccagtgtccaccagctgagactgatactctacctgagccagtgtgtcgagagcctcgatgtagccatctacatcgaaggaagactcatccttctcaatggcagaccaggcagaccggccaaccttgctccacttcttagcacgggaggctgtagaggacgcctctttggccgatttcttggaagcgatgccctgcagcttagagatgatatcgctgcccctgacgacctcatacatgctatccttggacggctgaggggccaggagggccgccatgaagagattatgccaggtctcggcgattggcttgacctccgaggcgatcgcggcagtctcaaaggccggctgtaggatgcttcccagcgcctttgccagctcggcccggcgcttggccgggatatccctcaaatgggatttggactgcttgtccgcagcctcgttgatgaggtgctccacgaatttggggtttgactccagtgaggtggccacatcagaagcccggtaatagacatctttgctctttttggccatgcaggcagggagagtgtcgatcatggcgttggtccacccaagaccccgcagttctttccgcgtgtatttggcaccagccttcttgagcggcatgccatagctcttctcaatttcaggattcaatcagaatccctcctattacaataaatttggacaggaaagccggacagccagtccggctttccctccatctcgtgcctaagctacaatgag

SEQ ID NO: 347 - DNA, 22995 bp, Flavonifractor plautii
  source 1..22995: mol_type = genomic DNA
ggctcgtacccaagccatcaggcaagcaaagaatccccgtgctgttttcttcgttaaaaaagattagaaaatcccagtcgctacgctgcggcgagctgtttcctggacctcagcagccagaagtacagcactgccgtcacaccagcgccgaagaccattccccagccaaacagcagggcaatgccattaagcgtcggaacccagatgcccgcccggtacagaaggaaggcgccgccgtagtacacggcgtttgtcaccaccgactggaccaggatatagttggtcttgcccagcccaaagaacacggcatggatgatattctggaacgcgtacacgacatagaagcccagcaagagcagtaccagctggaccaaccggtccgtatcggcatatccaaggatgccggacatgaagggcctccaaagggggatggagatgacccaaacccagcagatgccagccgtcagcaccgcatagctctgtaccttctgcctcaggctgctggcatcggttgccacatcccgcttgaccagctcgcccagctgggtgactgggagcagcagccacccccaaataaagttgttcgccatccaatatagcccctgctcctggactacattaaccatgcgaacgaccatcaccatatatgcgaagttccgaacaaacgactccaatccggataggctgccaaccctgaagaactcccgggcccggccgaaagacagtttcccgcccagcggcacgccctccctggccagcagaaccagcgcaacggcaaataaaatgccatttgcggccaggttagaccagccgatcccattgacgccaagccggagggagaagggcaggttggagaggagaaggcagtccagcagaatgctgagtaccagccgggcgccagtgagaacatagagccatttctccctgcccagcgtcaccagggccaccagggcaaaggagaacagtgtcgcaaagatgttggcgaaactctcgatgcggatataggctgccgacgcatcgatgatatcgggtgccgcggccatccagcccagcagcggcctggcgaacgcactcagcgcaacagccagggccgtccaaatgccggctgtcagccacagtccgctgcgcacccggttgccgaaagcagccttatccgagacgacctgtcccaggaagaggtacagaggcagcagtactgtctcctggacgatttcgtacagaagctgcacccagctgagctggccggcgatcgaataggcgcccggatccggcatctgtcccaggaagaagatgcgaacagcctgatatatggcggggcagaggcccatcaccagcagcgatgcgtacagccgatagttgattttggcctttcccatggagtccctccagggctggaggcttaacgccaccagtcctcccagggaccctcatcgtccagcaactgctgggcgctgatgccggccgcccgaatagcccggatggccgaggtcacggcaaggaaaatcgccgtccagacgcacagaagctgcaggatgtagctgaagcccatcacaattgccgccggcccctccggaacgactccggcgagtccgagagcggaggacagactgccgaaaaggcaggcaatgacgcccatgatcacgaacggtttctggttatagccagtcttccagggactgagcagcagccataaagccagcatggacatcagcccagacaggcagcgggctccaacctgcaggtacccagccaaagaaacccgtgccaggaacagcagtcccgtggagacggcaagcagtacaaggcctgcataggcattggtcttcatctgtctccgccatcgctcgtgcagagtctcctggaaaatttcccgcatggcatcgttcacatcgccggccgtcaagcctgcgtcttcatccacgatcgtgctggggtccagccccttggacttgctaatataggtttccatattcgttcctccttaaaagcaaattgttgttccctacaaggaacatgtggtgcccagggtgggactcgaacccacaagccttgcggcagccgggtttgggccggccgtgtctgcattgcaccaccagggcatatttcggcctcctcgaaaggaagccatgttggactattcgccgtagtcccgccggatctcccggcacagcttgtcgtagtaggcctttttgccgcagctgtcgcctttttccacgagctccaagtctccggcagcgagacgctgggcgatggtagccgtcagcaggtacagatcgatggcctttgccttgacgaaaattccgggatcatcgctggctgtgacatcgagtcccaaatgctgggcggcgccccaaagggcaacggccgcctccgggttgtttttaggagaaatgaggttgtctccgactaaaattttcatgtcgtactcctctctcgttggccccagcggaagccgaagtcgctccgtttgatcttgcacatctcaccattcccgcgatggaagacgatgccctcgatattatgcatctccagataggcacggatgccattgaagtcgcggggcacgccctccaggacgatgtcgccgtggcggaagaaggcgtcgtggtccagtttctcccggttggagttgaagtgcggcccgcacagctcataggtaccgtccgccaggggtccgacagacttaaatgttgccacaaaccatttgtcgccgggatcagtctcagagactggcatccagcagggcagatggcccgtgattggatcggcttctggctgacaggggactgcgttgggcgggattggcttgccgtttttggcgtcgtagcgtttgtacaggcggccgtcctgaaccagagtgcatgtgccgtctagcttgcgggtagctacgccttcaccggccagcacccattcgcacccaggggtcacctgatcggtgatgaggattttgtggttcggaagaaattcccggacaaacaaagttggaatctttctcatggaatttatccatcctttttgtttgatatattctattgaatccccatggcagaggagaggcgagtcgaacacctgtcagcggttttggagaccgcggttctaccactaaactactcccctgtatgatggtgggacagggaggtatcgaacctccatcctccggtttttcagaccggcgctccgacctcgtaagctactgtcccatatggtactcccagtggggatcgaacccacgacaccgccttgagagggcggggacttaacctcttgtccatgggagcatggggtgcccgaccggactcgaaccggcgacctctggagccacaatccagcgctctaaccaactgagctacgggcaacatagaagcgggccatatggcgccgcatggtgtccaaggtgggaatcgaacccacaatgccgcaaagggatcccgggtttgagccgggcgcgtctgccagttccgccacttggacatattggtgacccgaacgggatttgaacccgtgctgccgccgtgaaagggcggcgtcttaaccgcttgactatcgggccaggggggggtggtgcgcctgcggaggcttgaactccggaccctcgcattaaaagtgcgatgctctgccgactgagctacaagcgcatattgtttgcaagaaagccggtgtgctgctacgccaaaggtatatcggtcttttaggttctgctccgcccttgcagccctctccgtactcggttccatagcttcaccacctacgacttattcagcagacttatcgtcgttatggtctttgactgaccgatgtcccggcaccattttctcagaagcaggcgatcctgctaccaatgcagaggatgaatggcaaaaccttctgcgaccacatgcggcacatcacacactccttagatgatggttgcttctaagcctacattccggctttcatgcaaacttggtgggccaggttggactcgaaccaacagcgtatcttgcgtcaccgatttacagtcggcttccttcacccaatttggatactgacccatatggagggccctgtgggactcgaacccacgaccttgcggttaacagccgcatgctctaacctactgagctaaagacccgtatgtaccgtcttcttgcggtaaatgtgatttgctgaacttacccaacttccattcctaaaccctccaaccctttgtgtgccaatggattgctaacttactggtaacttgcaaatggtgcggatgaaggggatcgaaccctcacggtgtttccaccagcggattttaagaccgctgtgtctgcctgttccaccacacccgcatgcggagcgttgaaatattggtccgagtagtggggctcgaacccacaacatcatggtcccaaaccatgcgcgctaaccaattgcgctacacccggatatgtgccccgttcccggagcagttttagcaactttccaatttgccggccatttgccgatggtggtgcggttgatggggctcgaacccactctcgttgcctaagcatagcatccaggatgacccgcttccctacgcatttcagcagccggaccttccccggcttaggctttgcttgccgttcggtgcttctggaacctgtgcctgcgaccggtatccgttttaccgtgctctttccatcatgagctacaaccgcatatggcgcagcaagcaggactcgaacctgcaactcctttttggagcacccgctttccaagcgggccgactaccattatcacattgctgcagatggcagcggcagctgggttcgaaccaacaaccccctgggtcagaaccaggtactcttccaattgagctataccgctatatgggcccaggcagagcagggaagccctgcccgggcaaataggggaaaagaggagaacaacatggcccgctttcgcgggtggcgacagcggagggcgtcgaacccccaagcccgaagaccaccggtgttcaggaccgactggcacagccacttgccatcgctgccgtattggaaatcgtggaccccatgtgccccactctatttatattatatgcacttcctccgatttatattttcgggagcaagcaggtatcttttttaacgaagaaaagctgatggggcagttttctttgccgggatctctcgcccggtccggctccgttccggagcctatctcgggtccgtgtgacctgctcgtgactttcttcgaaagtcatgtggtttcccgcggcggcagagatagtcggctgtagtacaaaacaacgaaatcccatgggccccacatcggttcctgcgagggaaccggcccgcagccaaagctccaggcaaacaacccaaacccaggcctcttttcttcgttaaaaaagattgtcccgtccaccccaaaacaacagagcaaagaacatatctggcgaagggagggggactcgaacccccatgcccggttctcccggacaacccgattagcagtcgggcgccttaccaacttcggcgcatccctccatgattacagagagtataactccacaagccccttgaggtctccctcaacgcgctaacaatcagaatacatagaaaaagccagcccacgcatctgcgcagactggctgtcgacatctatgccaaaaggatagggaggcgttacaatccgcccattcccggcctgttcattgccaaatccgcgcacgacaaacgctcagaactattaaaccaatagctctgagaatcctgttcgttatgcaatttggcaatcgcaattcgcagcatgacaggccgctcctttcttctaatctgcccacattatacagactgttatggaaaaagtcaaggtcttttcgaaaatttctgcaaaaaaaatcagggcccgccattttggcgggccctgatgcggggctactgtcctcagccggtgccgtacaggcaggcgttcaggatcgtagatttgtccacgaatatttgatctccttcgatgcgccggtactgatccggcgtccgctccagcatatcagtcttccagcaaatgagatcgtactcgctgctgtcctcgatatatacggtgatgcggccgctggggagcagcaggtcagctttgcggaggctgtggatgccggacaggtccgggcatttgggctccagtaccagctgcagatgccgctgttccatataggaggcgctggccaatttgtcagtgtttcctacagtgcagcagccattgctgaagacccagacgcctggcgtcagctccggcagcagttcttcgtcctccggcatatttgggatgcgggccaggaactgcatattgccagcctggaccgggactccttcgatgatgtgggagctctgtacctgtccccaggagagctttcctgcggtgccggacgcaatgagtttccggccgaaaatctcccaataggcggatttcttaatctccgatgggagcccgaagatcttgccaagatggacagatgccatatctcagccctcctctccggccgcgatgttcagcactgaggcccgctcgaagacaatctccttcatgtccctgccgctgcagacaaggtcgtagtcggtgacatccttcaggatgagcggctcggagacgccggttggcagaagcagtttgacctcctgcccgatgagggcgctgaggctggcggggacgatcgggtccatgatgaggcggacccagatgccgcgccggtccacgggtggatcgatctcgggcacccagttagtcgcctcccctacgaagtaagggctggtgatttgcctctggtcgtgggtccaaaagttccagggtccaaaatttacggtgcggcagtcggccaggtctgaagtctggatgcaggggatatgggcgctgaactcgaaaccatccacagccaccaggatgcccgaatggaagttggactgtataatcgagtaccagtacgcctgcacgactgggtccttctggatgagcttgccgttttggatctgccatcggatgtccgtatcgttgttttgactgtcgccgatgctgaaaatctcagccttctggcgcttgcctccaatgtacagctcgtccgcggcatcgatatttaagtgcccaaacgagatgattttctccatgagatgattcctcctttagatgggggcgagactcatcaccgcctcccggtcgatataaactttgtctccttttctcactccccaatcgggggagatgtgcgtgtcctccgttatccggcagaccaggtcatagtcggtgaacccatccaaccatcctcgcaggacatagggctggaagaggaacttcaccggcttgccgacgagcgggtttggcgccaccggtaccggctccatgatgaggcgcagcatgcagcggacatcatattttgccgcctggctgaccttagcgccggcccgcggctcgcacatatgcggctggttcggggtctttggattgcagcaccagaatggataggagccccagtctaccgctttgatgacatcctggtcgtcgggcaggactgggatgcggcagatgaatgggaatccatccacctctacagggaggccggtgaggagctttggactctcctcgccgggccaccctgggcagacgatctgatgcgactgcaccatcagacccttgtaccaggcccactggatggtggtctgcatcggatccgtgtctcccactgagattttggtctcggcgccgccatgccggaggctgccgaactcaagctgcttcagcatggcgccggcacctccccgacagcgatcacggcgtcccgggagatgtagagggtctccagatcggcgtgccactgaacgaaggtattggagagcttgccctcatctgtctgaactctggagcaggtgatgtcgtaggcatccacctcgtccaggctggcggtgatgatgcaggtactcccaccatggtccagaatcatccgcacccgcttgccgaccagatccttcaactcaggattgatgggggtgaggatgagccgcaggtactcattggcagggccacagatgacgatcggctccggcttggggccaggggtcagcgtgaaggactgctgctccatgcgctggttgctgtatgcccagtagctgtgtttgggcatctcaaatttgccgcacagggctgcgtcctcgtcgatgcacgggatttgggcgttgaacaggagaccatcgatggtcacgcgatggccaaagataaggttggaccaggtgaggtccacccagcggcgccgggcgcagaggttgctctgaatgagcttgccatctgcaatgttccaggttaactggttaggatcagcccggttcgagttccccagtcggacttcttgcccatccgcgtcaatggactcgtccttcccgtcgatccagaagggagcggtagcgatggtgccgaagcggatgccggcctcagattctttgcggccagcgatgatgttgatgttagtctccatatgtattgttcctcctgtaactgtatatgcatttcctaatcggtatctggttgtatcatatgcaaattgcgccaaaactatattggggcgaaacggtttcgcggagtagttgttttgtgcgggatggaggggccaggggagaggtggctccttcgttctttgggcggatattggtagggtttttccattgctacaaacgacgaattttgcaaattgtttagaaaaacgagggagaatctggaatagtttttgaaaagcgtacatataactggacatcattccaatttgggggaaatatattcttttttggaggtatgtacatgatggagattcgtaatctcacaccccacgccatccatgtgctcggtgaggacagccaggttgttcttaccctgcccgcctctggcgtagttgcccgcgccgccacttcccgttcctgcgttggcgctgttgatgtcgacggcgtcgccgtccccgtcaacgccacctctttcggtgatgtcactgggctgcctgacccgcagccaggtgttgccttcgttgtgtctgccatcactgcacaagctgtgcgggaccgcgacgatgtatttatcgtagacgactcggtccgggacgcagacggtcgaatcatcggctgtcgcgcccttgcccgcgtctagcggcggcgtgccaaaagaccttctccaacaggagaaggtctttccagtctgttaacaaagaaacaggagccccggctacaacagccaaaggctcctattttgcagtccttaaagactggagacaagaatgcgcagcgcctggcgatatatgtcgctctttttcttcagtcgttccttccgctccttcgggcacatctccagccgggccggctccaggttcatgtccagatcggccagcttgaccgccacggcgatcttgttgctgcgcatcgcccggatgtagtccaaatacggcacccccttgcgatgcgtcagcagccggacggcctccacggcctccttgggcacgccccgatccaacagctctttcagggtgatgccgcagtcctcacagacatcgtgcagaagggccgccacaacggcagcttcgatcttctgctgctcggctaccaagatcggatgcaagatatagggaaaaccggcgctgtccgtctggccccggtgcgcctcctcggcgatctgcagggcgagccgcgttgcaggagtatatatcatgttgctccctccccaaaaattagtacgcgaggtaccgcgggttccgcagctgcaccaagggcagccgctgtagctggtacttggggtcgcaggccggatcctccggccaccggttgtagccatccgggatgacgacgcgcaggatgggccgcccatcgcagtcggcaaacttgtccagccgcacctggcaatcctcgaagatgccctccaccaggtcacccggacggaagacctcgccggcccgcacccggtagcccagctcgttcagcacgaacccgatcaccgagaccgggtactccagcaccacctggaattcgtatttggccccatgccgctcgatgagcccatgagaatggcaatcgcaaatattgttgacataggggtactcgattttaccgcagcaggcgcagggcacgccgttgcggatcaggtccagacgccaatctggattagtccggttgatctcgccggccttttgatgcaccgttggtacaaagtttttgctgttcttagacatgttgcaattcctcctctaatttaattctctctatttttctttcgccaaatatccggatacagcagcagcggtgtcggcacattctgcaggttgcatccgtagctacacttctcatcctccggccaccggtcctgtccatcctggaagacgacccgcagcaccggccggaactgaaggtccacatggaggtccagccgaacaagtgccccatccgccagaatatcgtccaacacatcgccaggctcgaactgatatccggcccgcacacggcagcaaaactcagcaaggatgttggccatatcccgtaggggagcatcgatcacgatctgaaactcatacggatgcccgtgcttctcacacataccctcagtgacaagatgggcgatcccgggcaggaagatacgctgccgggtccggctgttcgggttcatatacacccggtttggaacatgaacgagcttccaattgggccgggtccggcggtcaatcatcggaacatccggggcgtttttcttcttgattatgatgtatccctccaatctgaggttcttccaatgagcgccgcaaggggtctcggttatttatagccgagaaggtgactttgtggttgtacactatttatattatatgcaaatttgctgcagaatattttcgcaagttggctgtagctgaaaacaatttgctctggacggcggcggagacaaccaattctgggcttggagactgggcagtctcacggaccccacatagcttcctttcgggaacctatagcatagattcccgaagggaactggcccgcagcgatactgttcggcgaaggaaaatccccccgactcttctcttcgtaaaaaagactcaagcctttcccagcaaatcctgtacgcaaaaccattaggcgccaaacaaaaccctgccccgaatggaaaatttccagtccgcataggatagcttcagagaaaccaattttggagagaaaacacaaggaaggtatcaaaacatatggaatatattctaattcgccattttggcgccctgtacatcaatggagacccagctacagaatatccaatcctgaacggggaatggttcgctcccagcgagcatcttcggttgggaaacacacacggcaatggactgccctggatcgatattggacacgcctatatctctgtgaacccgctcatcaccggtattagcctggaatgtctgtggcggaagaaactacacttggccaagaaggtcctcatcgatgggctcgcctatcagatgaggctcatacgggccggcgccgtctctggttcggacctcggcgaaattgggatgttcgtggatgcctacgggaacgggagcgccaaggactacccaaaggtctggtacgatgtcccgaacagtgtcagcgtggatgaaggcaactatttccagttctccggccgggtcgcccgcgaaaatgtcgttctggaggggctatggccagcgagttctgtggcatggcctggcaaccagtcctggagccgatccaaccggcgctggacgacaagctgcagggaaagaagctatccatctggacaactgccggtgattttgtctccggcaacctgctggagttgaacgactatgacctggtcttggaaggcggcatcttccgccggttggacaggaattccacatccccgtgggtccgcgatgagaaggacatatacctggtggaccgtactggattacgggtcgtacaggaatacgaagaagaggagaaatgagaaaatggcgcctatcagcagatcttttgggaccttgtacatcgatggacggccggcagaaccgggggtgcagcttcctcagtcggcggaaaatccaaagatagagattggcaacagtgatgggagattcatccattgggtcgtcgtcggcggccttctggtttccagatacgatcttgttgtaggtattagctggaatgcactggtccacaatgccctcattgaaagccgggagatcacaattgatcggctaccataccgcatccggcttctccgcagaggagaggatgtggaagacctgggagagttcaagcagtacctcagagccctgggaagtcctgacaataccgccgctccaaggaagcgggtctggctggatgatcttggtatggaaggagacccttttaagccggcggcagtccggctgcgggacgggcaatatgagatgcgtggcctgaatgccggcgaccgaaagaacgcgtcctggatcccggttctggagccagtccagccagagctgtccgatgcccagggtgagaagatcgccatctggaccaataccggtgagtttgtcaccggcgacctggtggagatcaacgactatgaccttctgctgtccagcggtctttgcctttccgacgatggctccggccattcgccctgggtctccaattctggcttctgcatggccgtggacagaaagggtatctggtcgctgcaaacctacagcaaggaggcagtttaatggctattttagagaagttcggaacgatctatctggatgggatccctgtgccgccaggcacagtcctaaccaagtgcgattccaacaacccgcctaaaatcgagctgggagatacagtgcctggcatggaaattggctgggtattcgtggacgaccgactcattgcggatgacaacatcctccttaatgtcagctgagacatcctctccgcgtcaggcctgacgatggggaaggatatccagatcgatggcgacgcctgccgtgtgcggtgcctgctggaggataagaacggcgggtccgattgggacgacatgctggacgcctctgaggacaacaacatcatccattggtccggcacctattcgcttgggacctcagtcctgtcgccgcgcagcaaacaagccctcatctggggctgcgcggagaaagacacggtagagatgaccgattctgcatatcagcacattgggtttggctggcggccagtcctggagcaaaaaagtttgctggaatgcccggcgtcagacctgctggcccgcacggtgctgttatacggggaggatggaactatcttctctgggctggtcgccgaggcatctcagtacgatgtcattttggaggccccaaatatcctgggaaatgtcttctgccagcccccgagacaggggtactacaaagcacaggatgagtccctcatcctggatagggagtcaattctggagatattgccatgcgcgggagtttcggtgccattctaagacttgccaggtgtcttttttaacgaaaaaggctgcacaggttttccttcgttgcctggcatcagccgcgggccggctcctcgcagagcctttctatggcccgtgaggctgcccattcgttgctccagcaaaacaaattgtcgtcaccaacaatttgctgtgtaaagaatgagtcgctccgaccctgcatataacaaatcagactcagaatcaggagactatatagtttaggaggtacgaacaatgcaaaatatcttagagcaactgaaggcagtacgatattcggacacaatgctgctgcacgcacgccccggcattcggctggttgcggtacaggtcagcaatgggcctgtgtggtacgactatgagatccggccggtccggaggcagatcactaaggtcgaaatggacaaggacggtctcaccgtctccaccggcagcgaggatttcctgctcaccgaggatggcgagctggtagggctctgcaacgccatcgccggccgcgaggtcaagctcatcttcgatccggcgcaggtaatgccggaggctgaggccctaaaggccgccattttggcgaactacaaaagcgtgcggcgcgtcagcatctcgcccgactgccggactgccggaaaggatggatgagacatggcaaaggccgaactgaaggccgccctggagaatggccagtgcatggtggatctgctggagttctgctccggacaggagtgcgagatctttaagtccgaccgcttcgtggcgggcgatgagattttgtacatcccggatctgcagctgaacgagatccatatggagcggccgatcaccgacccggaggagttggaggatgtcctctcccagtgctacaccggcgacgacttcctggaggagtgcggcggagatatggagctggccatcgagctgttcctatattgcgattggcagcatcccagttccgctctgccggagctgcaggatgatgacgacatctgacggcgtccaaccaaagcggactcagagacttaggtctttgggtccgctgcctttttgcccgccgcgggagagaggtacaaaaacaaattgtttaagacaactggggagccgccgtacatcctgcagggtggcagccgggaaccccctggagaggcgccgtggcaatctcacggccccagcaaaggttccggaacggaaccggcctgcggccacgctcccggcaaaaacaaaaatctcctgcctcttttcttcgttaaaaaagatgcgttttttgaggcataggtacaacctctcggaaagaccaggcttgccacaacctccaacaagcaccattcctgtacacgggatcccggacaagccctccttgtgcccatcctccagaatagttcccgcccaacctgcataaaacaacttcagaaccccaatatcaggagaccaacaaaaccgaaggaggtattgcaacatggacgaacgcgaaagaaagatgatggcttttctggccggcatggtctggaaattggccaacgaccagtggttaaacatgaacgaggtccagcagctggacaacatcatgtccgagttgggctaccaagacctggacgaaaaagaattccgctattaaacggggtaggaggggcaacatgaaccagttatacgagagaatccgagttctctgcgaggagaaaaacatcaccatcggcgagctcagccgtagggcaaagctcaacgacgacgaccggcaggccctcaagcggggtcggcgcatgaacatcagcctgggcgccgccaagaacattgcccgtgtactgggcgtctccatcgattctctggctgaatacgagactcctaacctgctgagttctctcagccgcacccagcttcagcaggcggccgatgcctatgaggctatcatccgccgggaagtggttgaagaccgcttccgtgagcgggggctggatcccaaggagtatccggcttgcttcgaggaggccctgggccagtactgcgacgctttggactcgcagttcctcgaagaagaggccctggagcggattgccgagtatctgtctaagatggtcgccgaaaactgaaaggagaaaaacaaacatgaagatttttgtgctaaccagaaagatggacgatttcgagtctacggccgtggctacgccgtatctcagcctggaggctgcgcaggcggccatgactgaggactttaaggatatccttgaggtctttgggctgagtcccgacgacgagcaggaagaggagaagcagtggggtatcgaggaaaagtcggcccacatccgctacgacatctgctcccgctatgccgactggagcatccaggaacatgacctgccggtgcagatggccatccgtgtccgtgagggcatggtgcaagaggccatcgccaacgctgacatctatgtagaggttttcgacctggacacccaggatctggcagaggacggtaagacattcgaggccgaccggctggatgctgactaccagaagttaggcaaagagccgagctggcgggctgtatattaaggccgaaaagagtcccttccccatccgggagagggactctttctttgcgccaatatccctatgagggcatgcatatagtggcagtagcggcttcgatatcggtatttttgaaaaaatttttcaaatttcatttttctggcattgggacacacaacacgctcaaactgtgccggaatatcttggtgcgcacactccgttcgctcaaaatcgccagagtaaattgtaaatagatgttcataaagcacaattcggtctgtgaccttctccgaaggtcatgtggaaaccacgcccctttaggggcggtttaacatcacctcccccgattcctcggggtggtattttcgccaatagggtctgcgatgcgtgtatagtataacctatctccatatagagaggagggaaacctatgcctaccatcgcactcaccatgaaactgcaccttcgccccagcgaagaggatgcattggcctttggcgtcatgtccaaagcatatatggaagcctgcaactttgtcgcccaatatgcgttcgacaacggttgcttcctgagcgtgctcaagctgcataaggcgctgtaccaaactgtccgcagccaatttgggctgaaggctcagctggctgcatccgtatttcggaccgtcgttgcccgctacaaggctgtgcgggagcagctttggcagcgcccgttccgctacaaagatgaaaacggcgaacggcagtctatcacccgcgacctgaactggctccagcatccggtgcagttccaccggccgcaggccgacctggtgcgcaaccgggactacagctttgcccagaagggaaacaaaatctccgtgaatacgctgggcaagcgggccatcatgtcctatgacgcgcctgagtgctttgccggcttcttcgacggcagctggaccttcggtaccggcaaactggtgagcctcctgggtgagtggtacctccatatcccggcgacccgggaagtggatgacgccaccctggctgagctggacagctatgcccatattgttggcatcgaccgcggcatcaggttcctctctgtcagctatgatgaaaagggcaaaacctcctttgtctccggcagggagatcatggaaaatcggcaatcctttgcagatgtacgggccgaactgcagtccaggggcaccaaatctgcaaagcgggcgctgaagcgcatttcgggacgagagaaccgctggatgagggatgttaatcattgcctcacgaaggcactcgtctccgaatatggcgccggccccctctttgtagtagaggacctggcgggcatcagcttcgcggagggcaaccagcgtgacgcgaagggcaaccgggaactgcactcctgggcgttctatcagtacgagcaattcctcagctacaaggcgcagctggccggagccgaggtgctgaaggtcttgcccaagtacacctcccagcgctgccccaggtgtggccgcatccttaaatcaaaccgccaccgcgagacccatgaatatgtctgcgacgcctgcggctaccgcaccaacgacgaccgggcgggcgccatgaacatccattatctgggacggatgtacgcagcaggcgacccagagcctaagtttgtactgccgaagcctgctcctgctgccgcagatgcgagtggccccggagaagccaaactggcctagccaaaaggctaggccggttcgagaaacacatattcctgccgggtacatcctggcgggactaaaaaacgggtgttgtcaaccacccggcgatgtagccataggcctgctgtaccgcaggtaccgcatgtaaaagcggcgcttgggagcactccttcgggagcgacgccaggaccaaatgcgatgagctacaagccctggaaactatggagggttagggcccttagcaagctccgtaccctttatgggtcggggcagttgactttaggtgcatgctacttcaagtatgatacggacttcccctatgttccgcaggtagaagctcatatcgaattggcaaaaaagatgttgcccaaggttttcccactgccgccccaaatgcggctgttcgattaagtttagatatgttttcgcaacttctcacgcgagctctctaagaaaaaacgggcccatcccaaagctagggtgggaccaaatcgttgcatcaaaccaggtcatcgagttccactgctgccgtgtttgccttgtccagtccccggctccgcccacgaggagacatagtgccgggttcctgttccaaggaggccagcccgcagatgtgctgcacccgacctacttggccatccgttagcatcaccttgatcccgcgagggtgatagcccttgttggtgagcagcctgccgacaatgccacgggtcagcttcccagtcggctgatccttctttaggacaatatccaccagatcccccggatggatgcgatcgcggcggcagtgattcgtgttcatgaaaaactcgctccttttttaagaaagatgtcccaatgatatgcaaactgcccgcatctgataggccggaacagagctgatttgcataacgaatgatttcccaaggatttgcatataacaagacattctgatgcccgaccgatactggtctgggtacgaaaaaagaaaggagttgtttctatggaagacatttttggcggactggtattgctgatgggagggttcgtttccatctttgccatcatcgccctggcagtagtcatcctgatgatcatcgccaacatatttctcttccgcaagatgggcttacctggttggtactcgatcatcccattttggaatgtttacaaccaggtctctaagacctggctggtgacgccatggttctgggtttacctgggtctgtttgtggcaccatggttcctggatggcttcctgctgtcggtggtttcgatccttgcctttgccctgggtgtggccatgaacctgaagctggcggctgcgttcgggaagggtgtaggctattgcctggggctcatcttcctacctgtgattttcctgcctatgctggcgtttggccaggctacctacattggcaaccagaccacccccggaaagctgttctgacaacctgtacctgaaaagaaaactccctctctggcgatgtggctggggagggagttctttcgttgtagtacaaaacaatttgcttggattgcggttagagaaggggagtccaatcttttttaacgaagaaaagctgacggggcaattctctttgccgagagctttggtacgggccggctccataccggagccgatgccgggtccgtgagattgccgggcagatacggcagggtcgtacttctcccagcggcgccggtgcagcctccgactggacaagccatgtcattccttcgctgggggaatggcggagctctcacggacccgacatcggttcccgcgagggaaccgtctccggcgagaaactcaggcaaagacaaatttctctgcccattttcttcgttaaaaaagaatcctcatccgcacccagctcgcaagaggatgccatcattcgttaccggaccgaaccgccaacctccatcgtcgtcccaaacagcaggggagaggagccaacctgcgcatatagatgcctgctctctcgcatatcatattccatccaaacgaaaggaggaacaacaatcttgtccgagaaaccacccaccccattgccccaaaagccacacaccacgaccgcgtccctcatcttctgggggatattctcctccggcgccgccatatgtttttggtccagattcgccaaaagcctcgaaacaggcaacaaagatctctataccagcgagggtctcgttgcagtctgtgcttccggtcttctgctcgctgtccttttggaagctgcccgcatctggcggatgcgacggcggaaataatttccgaaaagcctgcatataataatagcgtccgcaaaggacaggggcagtctatggctgccctaaaattaaaacgccttctcagaaaggcgcaagttttttggaggatttcaaaaaaatgaacaagaaaatcaagtgcgcgatgtctcttgccgcagtggcggcgctctctgtctgcgttctcaccggctgcaccggcgacaaagacaaggatcctgctgactctcagacccctgatgtcagccagtcggcccaggtggatgagtcccagactcccgacagctccagcacccctgatgcctccgaacccgacgcctccgcgcctgatgcctctgtgcctgatggcagcgtgacacccgacagccagggtgatccggtactgacgcctgacggtactgaagtcgtggatgacgccaatgcaggcgatggctctgatgctgctgacgacggcgaagctgctgatggtgatgccgctgacagcactgaggacgatgcagatatcggcaaggatgttgccaagcactaagaccaacaatttagcggtgcagtccccccagcggagctgcaccgctctctacaggggtgtagccaagtggtaaggcctcgggttttggccccgatattcgctggttcgagtccagccatccccgccatgtgccctgtacgggtagaaaaaaatcaaaggagggaccaaagacatgggcaaaaaagttgcgatcaacaacatctgccgggccaccggcatagccacccagatcggagctttcgtagccatcctgaagttcaagaagccgcgcctaggcctggccatgaacgccgccagcgacttggtgtactgggcgcccgctgtagccgacaagaaagaccccaccatccggcacgagcttggcattgtcagcagcacgatcgccgtgatgagtctcctgtaccttgccgctacgcacggcaagaaggaggctgcctgatccctaacaacaaaaagtcgaaaggagaatatctgatatgtctcagaaatttgcatggttgccggtgaaggatgccgacctggcaactctgaagcgcgagctgtgcgtcgcccccgaatatgaggacaaggcggtcgccaagttccagaagttctgcaccgacaatgattttgaccagtatggtctggccgcccaccccaatccgctgactctgaagtcggttctggccggcagcgatatccaggagctgttcaccacgcctggtgaggagtggttcttcaccctggagacgaaggagcctggcttcctcatggaccatgcgccctgtatgttccaaaactccaagactggccgccggtgctatgttacccagccctacctgcctatgtgcggtaataacagccgtgatgccaaggctgaacggcaggcttggatgaagcatctggaaacctgggccaaggatgtcatgggcgtgaagtacaaggtcctggatcagagctcctggtatttcagtgatacggtgctcgttgtattctacctggacggcaacatcgtcagctgatctgccaaaaatggcgctccagaaacccctggggcgcccccatatcgcgggatggtgtagtagcagcacgatggagtcatgttcccacatctggccaaaaaggctaaagccgaaaagctcactctgcatcgcttggtatggccggctcgtacataggacccccctgcttttaggcacggggagtagtcagtacacgccgatggtacgacaatgggaatttccctgagaaatgcgggaggatacgacacccgccacgacacccgcctttaagagaggtcatggaatcatccgtggcctcttttttgtaggttttcgcatgaacctatgcggtttgtgcgacaaaaggcagccctcacggacccgacatcggttccggaacggagccggcccgcggcaaaagactccggcgaagggaaaattccccctgccacttcttcgttaacaattgcgccgtaaatcccccggattcatccgtgtgggatataaggcgctatatgactttctctgaaagccatgaacctcaggcaaagaatggtgtgccaaaatataaattcgatgaactgcatataataatatagcaatagggttacgatacaattttttcgttctgaaaggaggcggcgacccatgaaacagcagcgggcggtgaaagtggaactctaccccactgatgaacagcgcattctgatccataaaacatttggctgtgttcgtgctgtatggaacgatatgcttggcgacgagcaggagttctacgccgccgccgataaacatttcatccctaccacagccaagtacaagaagaaacgcccatacctcagtgaggtagacagtctggccctctgtaatgcacagctggcactgaagaaggcgttcaagcggttctttgagaaccctggacattttgggcatcccaagttcaaaaccaaaaagaaggctaagaaatcgtacacgacaaactgccagtatcatgtttccggccccacagtctacacggcaaaggacgccatacggctgccaaagctgggtctggtgaaggctaagctgtatcgcaatacccctgacaattgggtgctcaagtcggccaccatcagcgagaccaagtcgggccgtatcttttgcgctttgctctatgagtttgatgttcccgcgccgaaggaggttctgccaaccctggagaattccatcgggctggactactcctcaccgctgttttatgtggatcacgagaaccggtccccggacaagccccagtggttccgggaatctgaagccaagctcgcccatgagcagcggctgctgtcccacatgaaatatgggtcaaagaattacatccggcagctccacaaaatcgaggtgcttcaggagcacattgccaaccagagaaaggacttcgcccacaaggaaagcaggcggatagccaacgcctacggagccgtgtgcgtggaggacctggatctgcaggcaatggctcaaagcctgaatctgggcaaggcgacaaacgacaatgggtttggcatgtttagggagtttctcaaatacaagctggaaga

SEQ ID NO: 348 - DNA, 11304 bp, Flavonifractor plautii
  source 1..11304: mol_type = genomic DNA
cttttcttcgttaaaaaagatggctcccctcgcctgttcgcataggctctcagaatagcatccgccgtcaccgcataggatagccttagaaaaccaattaggagatagcaaaaaacaggaggtgctcatatggaattggaggacattggaaaatacggcgcagggcagctgcggttcggctctatgattcttggcggcaagcaatggggattccccgagcggtacgatatgtacaagactgagagcatcagccttggcgacacggccagccgcggggtgatcccctggacggtcgttggcaatgtactgatgtgcaactacaacctgctctccgacattctttggggggagctgcacgcgatgcggctcatctccgggcggacattccatatcgatgggttcaggtttcgctgccgggttccgatttccgattcggatccgagcaaaccaaccgagtgggacatcgccatggcgatccataacggcgacaaccaattctggaattggcggaatgccccatcgtgggtgaactcggagatggaattcccgagcatgcggtgcgtctgcggcggcaagggagcggtgaatcgggaatggaagatgctttccgatactgccggctggcgtccggtcctggagccgagagccgtgttccgtccgaatgaggacgcgccgctggttggttctaacctgctggtctggggttgcgcatcggtggtttgtggtcaggtgctggaggtcacaccctacgacatcctgctgaagtctggcctcggatggcaggcgcccctgaacccgatgtttcgagttgtggatgacgatatcgtcattgtggaccgcagcaggttcgagttctaccaggtggcggaggattagaaaaaataggagggattctgttttggcaagtattattaagttcggctcgctcatgatgaacggcgaggtttggccgttcccgatcctgcgggacggcaaggatttctggctgggcgatacggccgaaaagcatcagatcccctggctggtagtggacaacaaattagtctgctgctggaacctcattgcgaggctgagctgggaggagctggaggcagggcgctgggcatctgggaaacctgtctttctggatggattctcgttcggctgccggctccttcagcagtcggacaacggcggcaacgaatggaaccgggccatggaggcttgcggcggcgacaacgccgcgttccattggcggaattgtcccagctggacccgaaagaaacgaccggacgaaagctgggcaggttttgccctcggcggagaaaagaaagcggaaccgtacatcaccgccggctggaggccggtactggtacctctggggcaggattctcccaatgatgagttcctccccggatgggacctgctcgtctggggcagcgattttgtcctggagggtgtcctgcaggaccagacccagtacgacatgctgctgcgcatgcagcgggatgcctttctcccggagaaccccgcgtaccggctattcgaggacaattttgtcgcggtggacccagcgcaggtgaagttcgtgcaggtcgcccgccagaaagcggggtgatggcagatggcaactctgttgttgggaaccctcgtccagaatgggaagcggaaccagtttccgacggcctattcgggcggcgattttggattggccgatgcggacagcgcacagcagatcgcctggctggtcactggcggcaccctcttttgctgccacaacctgctcacgggcatcagctggaaggcgctggcccagcattccatggtctttggctgcagagcagaaatcgatgggttcgagttcctctgccgcattcctctcccgggcgaagcgcccggcggagagtgggatgaggccgtggatctggtacagggagacgaccggcttttccattggaaggaatttcggtcctggtgccagagcgttggcctctccgccggcacgcgcgttgttcgcggcggcggcatggccaaggagtggcagtcgtatccggagaatgcgtacgcctgctggcggccagttctggagccaaaaggcgtgccgatcccgcaaaccggactccggctgcaggctgggtatgagctgctggtctgggacgacaactgcgtggtgcgcggcaagttcctggatgaaagcgactacgacctggtcctgcagtccagcggcacctggttcgccgatgccggggtccttttccagcccctggagaagaagatccggactatcgccgtggacaaatcccaggtgcggatagtgcagatcgggagatatatcggttcctgaatatagggagtctgggcattttgcccgggctcccttctttttgttctgccggacatgccgcgtccgattctccatcgtagagaaaaacgatttgctccgcggagtcctcacggacccgacttcggtcccggcagggaccggctccggcgagagactcaggcgaaaacaaatcctccgctgcttttcttcgttaaaaaagatccgcacccccgggcactccagggcgagcaccattagagtctggcgaacctcacctcgcccgaatggaaaatctcatcctcgcataggatagcttcagaaaaaccgatctggagacaaagaacaaaaggaggaatcaattttggaagcaagaattcgaaaactcggcacattgtactctggcaccgagctgatcggctcgaaatgcagtcttgcctactctaagggcgaccatcccagggacatcatcatccgcgatacggtccctggcctggagatctcctgggtggagtacgacggcctactgatgtcccagtacccgatcctgtgcaagatctccttcgatgatctgaagtttgccgggctcatccaggacaagaaggtccagatcgatggcgttcgctatgagctccggctgctgcgcggtggactccgagactatccaagctccgacgacctgtgggtgcgcgaggtacggaaggtcgcggagggtgtctggaggaatgccgatttccgctgctggggataccgctccccagcgcctggctcctactccttcgacggcatcctcacggccctaaccgactcagacagccctatctggacggcagtgctgcccaccgatacgcgaactgagacgattggctggcggccggtgctggagccagtcttcgaggacccagaagcactcccatctggcgcagaggtcttcgtccgtttctcgggcggagaactcgtcaccggcagcctgcaggaggtgaacgactatgatatcgttctctccgacagcaatggctacggcaaggagggcgcctgccggcatatcggcgatcatgtcctgtgtatcgatcgcaatgccatccaggagctccgacggatgcggagatacggagacggcggctggtccggttcaatctgtccgcaggaggattgaaaaaatgccggtgaaaatcagaaaattggggaccctgttcctggacgaccagccgtatatcgtggatccgaacggactgatggacatgtccaatgagagtatttcgatcgaggatacggtgcgtgggatggccatcgaatggctggaatacgacgaccagctggtggccaggagcccgctcttgcgctttgcctcccatctggcgctgctgaagaaccatctggccggcggcagcgaggtctgtttggaggatgtgcgctatgaggtccggcttccgattgccgggactgcaaatttgccgagtctggacgaccgctggttccggctggggcagcctgtcttctccatgggtgacaaggccagcgccctgtgcctggggatccggaagaaatattcggttccttcggaggacgatcgggtgtttgcctcccatttcgcctatatggacagcccgcaatggatgcccctcagcgacctcactggtgctcagatgttcgatgtctgctggcggccgatcctggagcccaccttcctggatcctgagaagctgaagcaggggacggcggtgcgcgtccgctatggcgtattgtcggaggttttcggcgacctggtggaggtgtccaagtacgatattgttttggacaacatattcgggtactctgagaaaaaggatacgcagggggcaaaactcatcgaggaagagaagctcgtgatcgagcgggcttcgatccaccagctgcggagaaaccgcggctgagaaaaaggacctgggcagctttgcctgggtcctttccctatatgggatgagagcaatcctggcagaaaccctatattggatgctgttaggcaaggtctctccagtcttttttaacgaagaaatgtgggcggggagatttttgtctgccgggtggccattgccgcgggccggctccatgcaggagccgatgccgggtccgtgagatagcctttctcatcggacttggcggagaagatgcatcatcttccggtccgagcggctcgcatcgcctgccatgtccgcagtccacccggacatgccgtgtccgcttctcccttgtagggaaaaacgatttgctccgcggagccctcacggacccgaaaccggttcccgcgagggaaccggctgaggcgagtgctctgggcaaacaaaacagaccccggcagcttttctccgttaaaaaagcccagctccccgcagcggtcgccaaaatagtatccggactatccgcataggatagtttcagacaacaatttagggaaatataagaacaaaaggagaagatacatatggagactaggttaaagaaattcggcaccctcttcatcgataacaaaccataccagacctcagacatcgtcgcacccaccgagctggatgggaggaagatggagatcggggatacggtccctggctttgagatcgagtgggtggaaaaccacggtatctatgtcccccgcatgccgctgtgcagccacatctcctatcaggacctgtggtacatgagcggcaaggacggcctccgtgtcagcatcgaccatgatctctatgagatgcggctgcccaccctcggctatccgaagaacccgtctccggacgacctctggttccgggctgtgagagctgatgtggaggatgtctggcagatggagggtatgcggatctgggccgagcaggagcctgaggaggacccattccacgctcgaaatgtggtgctgttcaccctggaccgctacgaccggcggtatcctgagctcaggaaggctggcagcaaggcaattcgggcagccaatatcggctggcggccggtgctggagtgcatcactctggatccggagcagctggcctcgggcacacctctgcgtgttttctttggcagccataccagcgcctatggaaaactgggcgatgtcaccccgtatgacattgtcctggaggacctatcctcagtgagccagtatgacccggccggcagcttcatcgaccgcaagacgctcatcatcgaccgcagcagtatccagtatctgcggtacgaccgcgtagtgtaggaggaaacaaacatggtaggagaaactgaaattcgcaaggccttttcgctgtcgctgaacggcgacacggtggagactgggtgcatctatggaggccccgaagaggcaccccgcctggacctggtccaggccgagcccggcaaggagattacctggatcaagaagggcggcgtctacattgccgcgcgcaacatcatctccggcgtcagctggactgatctgtacgagaatggctgggtactgggcagagaactggagctggatggccgtgcctatctctgccggctcatggaggtcggtgagaaggcagaccgctactctgaatatgagcggttgctcgcctttgtggccctcgaaccatccaggaccaactcattgtcctggggccgggagcagacaggggagaagatggctgccgtgcggggcggcatcggctgcaagaactggtgctcactgccctatggcaaccgaagcggcgcctgcggctggtggcctatcctggaaccgctcatgctggctctgaacgacgcctccattggccaggacattgaagtccgcaagctgagcagtaatatcgtgatatgcggcaagctgctccatttcaccgactacgatctgatcatcgaggtggatggattcgtctggccaagcctcgattggggcaaggagatcgacccgggcatctgggtcctggacaggagccagttgggctatatggcctatatctgagaggagagagctaaatggcgatagcaattcgagaatttctggcgccgatcgtggatggcatcaccctggatgccagaacgaccatgatggccgggcatacccgcattgggctcacggacaaatgtccaaatggcgagaaaccgatccggtggctgcagcgcggcgcccggttcgcggccatggacaatgtcctgctgggcgtcagctacgacgacctggacgagcgcggcctggtgcatggcaagcctctggatttcctaatcgatggcctggagtaccagtgccggctgctcgctgttggcagcaacgccaaacagcgcaacgagtgggaggagttctttgccggtctcggcgacaatctaaccaggagcatggacggctgttattcctgggggctcgacaccccggatggcggcctggctgctgcccgcagaggctgtggcatggcccactggacccggttcagccaggaggcccgcatgccattggtaggctggcgccctgtgctggagccgatcctcccgcccatagacgccattcctgctggtttccggctgaagatcatcggcaaggatttcatgggtagggaagtggccgtggagggaactctggtctataccaacgactacgacctgtttctgcgagtggacatgttcccggacaagcggctccactggtggcagactgcgggtaccgcccctggcgtcatcaccgtggacaagagcgccatcgtccgcgtggcggcactttgatcgtacagggggcctgggcatcttgctcgggcccctgctctttgccgatatgcgaaagttggcaagtgcatataatagaagtgagaaaacgaacttcggcgctcacttcgctgatgggatgtgcgcgaaagttaggtcccaaggatttgggctttgggcgacagcaaggcgaagtatcttttttaacgaagaaaatgggcggaggattttcctcccgccagatgctctgccgcgggccggttccgtcccggagccgatgccgggtccgtgaggctgctccggcgccccctcccacaagcaaattgttttgaaaacattttgtcgctgtcctgggcggcagaaaggagaaaacgaacgacatggagaatatcatttcgatgggtaccctgtacctaaatggaaagcctgtggacgcacgaactgcctgtccagaggatgtccaggatatccggcttggcgatacggtccccggcaaggaactcagctttgtgctagtgaacgggctcctggttgccaacaacagcgttatgctggatgtcccctttgaggtcctccgcgccagccatctggtccgggcccgggctgtcgtcatcgatggcagcaactaccgctgccggctgctccagaccgatgaggatgagaatgacgccgatgagtgggaccgggcgctgatcgcaaccggcgcgaaccggcagctgtggaacctgtacgacaacgagcccttctggacggttagcccacacggcatggaggttcggggcgggcacggagacccggaaggcagatatgcctggcggccggtactggaaccattcgtgctgagtttctcccggctgcgcaagggcgacatggtcatcgccggtggcgggaacagcctgttccacgcccggctgcacgatatcaccgactatgatctggtcttggatatggacaacgccaatatagtgccagaagattcgttcttcggcgctgacggcgacggacattttgttctggatcggtcggccctgacagtcgcccgcatggcgccagaacaggaggcgtacaatggctaatacgatccagtttggcagcctgtacctgggcaagactccagagatcgcccaatgcgtatatccctgccaccggccggctatcagcgttggcgatatggtggaagggaaagaggtgcgctgggtgctggtggatggccttctggttgccagctacccgatcctccatgaggtctcctgggaagacctggaggagcaggggctggtggaaggccgcgaggtcgtcatcgacggcagccgctaccgctgccggctgctctgcacctacggcaacagccggacccagctcgatgaatgggagctgtccaaaaagaccgtatatccggaactgcaggtcctcaccatggacagggaggatggctgcttctgggtgctcggcccatttgggccagagctgaagctgggctgcaagaaagaaggccgggacgagtacagctggcgcccagtgctggatcccatctccctggatttctccaggctgaaggagggcgactatgtccagctgggctgcggctcgaacctcatctccggctttctggaggaggcaaccgactacgatctcatcctggacaagaacttctcccaaatctctgaggtctatctgggagatatcgaggattttgcccgcaaggaaaagaacggccgctgggccgtggacaaatcggccatctcagttgcccgcacaaacaatgcgcgcggagaagagatcatctggctgtccgcaatatgagctccctgtttcgaaaaacagggagctcttctctttgttgtcagaaacaatttgccagtggcagaccgtggcagggggggagagaaaatctcacggacccgacatcggttcccgcgagggaaccggcccgggcgagaggctctgggcaaagggaaatccccgtgccacttttcttcgttaaaaaagacgcgacccctgggcaaaagaccatcctgtccgttcgcagagaatgatattctcccaattcgcataggatagttcagatatccaattatggagagaaagaaaactcaggagaaaatcaaaaaagaaaggagaaatcgccaaaatggccaataagatatatcttggcactgtctgggtaaacggagagaaacaagctccagtggcctcctatgccaggatcgccggggatgacaatgtcgtgcctatcatcgaggtgaaggacagcgaggacaacgaccacaacatcctctgggttatctgccatggtaagctgctggcggcagaaccattgctggtcagcatcagctacgacgacctgctgctccacggctatctgtttgggcagccggtcacgatcgatggccaggagttcaatatccggatggtgagagatttcgaggagtggacggagtttggttcagtcggggagtccgcctatgccctgcatgggaccggcaccctgatcggggggcctgtggacacgaccgtctccctgtgttcagtcgccaatggggcgcctggaggtggggaaataaactccaacttcaagatggcccgccgctccggcactgtctgctggcggccggttttggagcccaccaccccggtggaacaacagctggaaggcatcaagcctggccgctgggtcgccctctggggcggcgacagtgtcgtatccggcatcctcaaggagatcaataactacgacctgatcctccaccattcgtccgctgacggcctggaggaacaagacaaggggatcctggctgtcccgttgcctaatggacgggtgtgcgtggacaaggcgtccatcgtgggcgtacgcacgaaccctcaggaccaaaggaggagagcaacatgatggtgagaaaactatcgttcggcactccctatctggacaatgtaccggtgaagccaggggaactcgactgttttcccgatacccggaacatctggatcggcgagtctaagaagggcaagcagatcaactggatcctgcaggatggcaggttgatcgccgaccgggtcgtcctatggggcatcgcctggcgtcagatggtgacaaacagccttgccagtggagatgcccctccaatcattctggatggacagctgttccgctgccggcttctggaggtcagtcctcagctggatgagtggagcgcggccctgtgggccaaggagatgctcatctgggcatccgagaaataccgctacttctgggtgatcgaaacggacggcgaggaacgccgtcctggccggcgcaacagtatgcgagcctgcctgcctacaaaggctgatcagaaggagggctggctgccggtactggagcccctgcagccccgcttcgggaacctggaacaaggccagtacctggatgtctgctccaatgagcagatcatctccgggtggctgtacgaccagaccgactatgatctggtcctccggccggatcccaaaaagctcgtcccggacaacttggatcctgagatctttgcccccgacggcgacatgtttgccatcagcaaggcagggatacggatcttgcaacagcggaaggaggagattggcaatggctaaccgggtgcagataggctccatttggatggatggcatccttaaaaggccctgtttcaggttcgagccggaagatcattttccattcgatccagttgccaatatcgaattccgcgacagtaccggcggcccggatgatatcatctggatcgttgccaacaacaaactgatcgccgaccggccggtcatgcactcggccagttttgcagatttgcaggagttgaacctggggcatggccaggaggtcgtcctggatggacaacggtaccggatccggacgctgatggatctggaagagtggacttcggccctggatgagattggggaggacgatcacatctggcactgggaacagcgccagtcgttcctccagcagccatccggcgaagagagcaaagtcatctgtacagatctgggcaacccgtatcacgcagtcacggctgttcggaccgaccggcggtatcagactgcctggcggccagtgctggagctggccaggaaacctgatttccggcaactggagatcgggcagaagctgctctgctggggcgggcagagtctggtgagcggcatcctgctggaggatgggacctacgacctgattcttcagcggcaggatggcaccgatatctgtcccaaggatgcgacaacatttgcaagcccggccatgggcgacaaggtcatcgtgaacaaatcggccgtggcaggggtcaaacgaa

SEQ ID NO: 349 - DNA, 8682 bp, Flavonifractor plautii
  source 1..8682: mol_type = genomic DNA
cttttcttcgttaaaaaagatcggtcggaccacgcccggcacagctatagcatcctcacggaccacacataggttcctgagggaaccggcccgtggcggaagcctctcggtaaaaagaaaaatctctgccgcatttttccggtaataatgaaaatccctatataacagaaagaaccctatatccagaaagacagaccaatctctattaagaaaatccatgagctctcaccacacgcactacaacgacccatatcccaaaagaacagcacaactacgagcacctaccgcaaaaagaaccatatcccctatataggagagtgcccccagagagtcttctataaaaaaagagcctcctaatccccgcacccgccagcgcaaaaaaccaaattgcctatatatgagatatcaccaaccaacctatccaaagagaaaactccccatatccagaaaacagaaaaagaaagacccgggccgaagcccgggtcccgtccctgcctatttcagaatcgtgataccgcgtccgctctgcccgcagaagttgatcaccgtctttttgctgaccccggcaaaatccttgctgtatcccaccagcagcttgtccccttcctcgaacagcttccgcccatccacgatgccgtccatcatcctcaggatcatcagcatcaccttcgcatcgctcatgtccctcggctccatgttctctgcaaacagcacatcatcccgcttccagtggcacccatcgcctaccccgatccggtggcagtcctcgccagtgcagctcccacagccgccctcatccgggatgaagctcctctcgaacaccagcggcagatcctcgtcttcgatgtcttcgtcctccctagacccaaccgacagcaccaggtactggtccttcctgatgtgcttgtactgctgcatgagagactccaggcactccagatgcgcgaaaacaagctcagaatcctcatcctccggatcaatgatgcgccgccccaccggagttagccggtccttcccctcatcgcagatggccgcaaacaaccgctccttgtcggggtccatgaatccggcatccaccacagccttccggaggtcctccataagaacgacctccctgtcagtgagactgccgttgtcctccgtctccagcatctcatgggcatccggtgccaactgccgctgcagcataaagcaggaaccaagcagtcctaccgcctcctcacgaacagtcttggcgacctcgtacaacttgccgagctcctcatccacgggagtctcatccagctcttcctgcatcacctgcatcgcaaaggtctccgctacgaacgccagcgagacattctcctccgcctggtccatgtccggatcggctgccagacacgacatggcatcagccgtgggccggatctcccggatctttcggtacagcatcagcagtgcctccatgtggtccattttctctaattccaaatatttcatgtccagtcctccttaaaatctttcccagcgaaactgtttcgtgcaacaaaaaagaaagacccgggccgaagcccgggtccaagtcgtcaagccacgaccatgatatacttgccgtccctgttgcggacaacggcgatagcagagctgtcctccataccgctgaacccatccacgccaacaccgatcatacagtcgctggcatcttcgatctcaccgatggtcttcaaatggccgatcagcgctttggccagctcagcgtcctcaccctccaggtcctccaggctgacgatgcggccgccaggctcatcctcgactgcgccagccaccaggtaaatctcctggccttcgccaatgtggccggcctccgccattgcgtcacgcaggaccgtcaccagctcgcccaccggagcgtcataggcgatcagccgctggcccgcctccaggtcgccgtcaccgatcgggtcgccatggacgatgtacagctgctcgccaggcgtcagaagaccgcactcagccagggccttgcccacggcctgcatagcctccacctcggcgtccgtcatctccacatattccccgtcgtcatcgaaatcctcgtcctcgaagccgtcatagaagtcctcatcatcgaaatcctcgtcgtcatcgaagtcggattcgtcgtccccgtccaccagctccatggcctcggtaaacaggtcgccctcaagttccccgatgtcatccgacaggtcgtaggcggcattgacgacctctactgccgcttccgccagctcgctcagctgctcgtcccgtcccgtgcgctccagctcggactggagcaccgtcagcccaaacgcctccgccaggttcaccagggtcagccgctccagggccttgtccatctcctggtcgtccgtcatcgccgcgatcggcgtaatgcactctgagttctcctccagctttctggccagcagcgccagagccaccatcgtgtccatctgcctcagctctgaataagtcatatccatgtcctcctcatgtttttgttttaagtctccctcggtgcggagaggttctatatatattatatgcagttgtgcatttttatattttgctagaaggcggatcttttttaacgaagaaatgtggccggagattttgtcttcgccagttggcgttgccgcgggccggtccctaccgggaccgaagtcgggtccgtgaggggtcccctcctctaccgggccatcagtcgcaaatccggcggctaggccaaatgcggactccaaatcagcactcctggatgctgaggatggcctcccgatccacagcaatacgcccgttcccaatctcacagccgaagccagggtcatggtgcagtttttcgctccagccggaaagaaccacctcatagtcggtaacctcctccagccatccgcgtacggcctcctagctgccccagattgccacgcgctgtcccaccggcgcgtcctccaagcgaaccgtggacagtggctccaggaccggccgaaaaccaaaggcaatgtaccggaacgaggcatcgatcgcctcccgaagacgagctgactcgccgcccctcagcacccggtacagagggattccagcagcccgctcctggccccagaatcgcggtcctttcccagtccagactccgccgttttctcctacaatatccaaggcggcatcccactcgttcggcatgccctcacaggccccaacccggagcgacctcagcgtatagcggagtccgcctatggagacctctttgccgaatatcaggccctgtgtgttcaggtcgtcccaactgatgttggacagaaggcattggtcggcaatgaggatcccgttcaccagcacccaggtgatctctttgccgggtacagccttgccaatcccaatagcctggtcttgctggaactcgaccaagggcaaaatgggctggtcgtccagatagaggctgcccatacggatcatgttcgccatgccaaagccctcctttctggatatatgatgtgcaaacccgccaccaacccctgccagcaccggctgggccgcatcggccccaataatatgcaaataatatgcagaataataagcagaaaatatgcagataataccttccgtgacgggcataatatgtatctaatatgcgggcaatattcgaataatcagcggataatatgcgggagcggggataatatgcagataatatgcggatgtggcatggaagtacaggcgttggtcggaggctgggccgcaaaggtgggcgtagggggggcggagatatggcggcaggtggaaggcggataggtcggaggccaggatgtaggcggatgggtttgagacagggtggaaaggttaaatgggctggtcggaagctgggcggaaaggttgagcggatgggtcggaagcaatgcggagatgttagatggattggtttgtgacagggagcaggctgtaggcgaatgggacggaggcagagcggcgttgaccgggagtggttcttttggggtttctccgtggcgttatccccgggctccgtcgaccgccccgtgttctgagagatgccttcgtctttcgttggcgttcccaggctcaaacgaccgtaatggttggcaaaaacagccgtctcccgggagattgccccccaggtttgcgtacttcccaaggcgttctcaggcaggctggcgtctccctcgttcccaatgcaccagagttccaccgtcgcagtcatcctgaaggatggaaagttcccgtctcaggctctcaatgagagtttcaccatggccggcatcctgatgcggtatcgaccatccctggtattcctcagcggcatcatcctccccggcaaccagaagaacgcatatctctgggccgatatcctgatggcagcaacctcctccatgacagaacagctcgcaaaaactggaaagagcatcgagaataggcaatatggaactaatttggagacagggattagaatacacggtttttgacgattacattacggtaactgtatggttctacaatggagttcggcggggtttaatatggtttataaccgggtgaggaaagataggtggtcacaatatgcaggagtcggggcgttcggcaaaagaaaaacccagccgcaagggctgggcttccatgtgcgatatcagcttaattgtcctcagtggccgtctccgccaggccccagttgttggcttccaggctggcaaaatagttccaggtcttgggatcggctgccttcaactttgccatatcctccggggccgtctttcatctgcacgcaagcaccacatgaccttcttttcagaaagtcacagatgccgccttatatccccccccacgcagatttcctacggagaacctgcacggctaaagccgggggggggcttatggcggcgcagataagatgagtttcttgtttgcacaaacactgggctgcattttacttcaggatacccgacgctggggtatcccgctccccttcttctctatttggatagttgcaaaatcgcatgagccatgcgctggacaacagcttgtgccatataccatggccgcaacctcacggacccggcataggttcccgatgagggaaccggctaaggcgagagcctccggcaaagacagattcccccatctcttttcttcattaaaaaagactggttttccactgtcgtctcgccgttagatggaaactcccggaatactcgccgcaaagaaatcctgaatctcatgccagaagaacatccgccccatggtcacggcagctgcaatcaggatcacaacactcatgcgcagaacaaaatgcagtttgccagcccggttccaggtatccatggaggagcggaatgccactccatcctcatacaacccaactggccaagccagtttctcccccattgctccgcagccgatattccataccaggagcaaaggcagagtggccaatgccggaatgatagacttcaaaactccggccgccgtaagggtgccaagtataatgggagctaggcaaggcagggcaaacaagaatgtcttatatgccttatgcgcaaagccaaatccaagagggtcaaggaagccaccccaattccatttgaacagtttagctccctcgttgtagaatggagatgccgaatttgccatgaaaaacacatcctttcaatctctgactgctcccaccccttacggagtgtagacctagcgtagcggtctatgtggggcttttccgcggtccattttgtaaatatcgtatgcacgctgtcccatagccattggcgcaactaaccatggcaaaaagcgcaaaagaaaaccagcccggaaaggctggttcagtgatggatgatggtcaggacatgtcccagttgttggattccagttcggcgaaataggcgtaggttccaggggcggctgcctgcagcttggacaaccgatcctcattgccattggatgcgatccaatactcaaagacctcagcaaagtattcattatcgttcgtcattgcgtactcccccagaagggcctctgcctgctttgcttctttctcatataactgttccaccgtctccggtgcccggacatgatgatgaaggaagtgcccaaactcatggaccatgctgccggcattggccacaagcagtgtcttcttgccatatatggtaagcccgctggcggattttccatttttgttgttccaaacggcgagttcctcgttgccaacaacaagggaccaaccttcctcttggaatttgtctcggatgatctttgggaccttctctgcttcctgcagaaattgcccgctggaaaccatataggcatcctcgatggcaatattgagctcctccatgatggatggcggaacgactggattagtctgtcctgtgcccaccaggtacagcatctgggcaacctccgccctggtgatatattcccacgggtcggccgccatatcgcagaggcccaggtttgctgcggcaaatatcggtcgtccacatcgctgccggcatcgtacagctccggtccgtatgcagggatgccagcacaggccaacagcgtcttatacgcccagcctcgcgtcacccggctgtccaggtacaagtcaggcgtgaggacgaccccatcccgcctgcgcattgtctcagcgactgcatcttccatcgtccattccttgtctgggaagaaggctctgcaaaacatcatagccatttcgccgctgctgacgagccggtctggagagaaggtgctggcgctggtgccggtggtaatgccattgtcgtaggcatagctaatggcctctgcataactggagtcaggcgagacatcctggaatggcccaactgcaaatactggaacggcagtcccatgcagcatgctgacagccaacagcatggctggaatttttctcttaatacccatggaaacatcctccttagaacggttcttcccacatgactttctctgaaagtcacaattttgtggttgtacatctgctattagacaaattgccaacctctacctcggggtggaggccaccactaagttgggatagcccttagcatacgaattgtctttccaagctattatatgcaaattcttcgttccgtatttcagcacttctttgcagaaaatgcgaatcgcagcaactgcatataatagaagtgaaagacctgctaacaaaagtcaagtagaaatttcaggttttaggagcagcgaaaaaggcaacacaaaatcaagccgctgagcaacacaaaatcgaaacggcggccagccagatggtataacgcaggggaatcagtcgtgttccagggaatccaaataggccttcacagaagcgtagtagatacgcaagaacttgttggcggatgccatcatgtagacacggtatggcttgccctcagagcgtttcttgttcatgaactggtagaccggctcatccattggagcgcattgcaggaggacgcccatcaccaggaaaagtgtcctgcgcagtgaggcagatcccctcttggaaatgctgcggctgcggacatctatttggccagattggtagggcggggcgtcaatgcctgcaaaggccaccagcgctttcttggaatgaaaacggcgcacatcgccaatttcagctatgagttgggggccgagtgtagggccaacaccaaacattcccatcactacaggatactccggcagagaagctgccagagactgcatctcctgcttgagagcagctaatgcggcggaagttgtctggagttgggaaatggcctgttctaccaaaagttttgccgtatttgttttcggcatgacaccgaagcgtccacaggcagaggcataaatatccaacgccttatcttggctgaaattgtagccgtgctttctgcaccacttctggtacttggcggtaaaggctttcttagacagaccacagacacactcgcaatgccaaaaagtggcgacaaagtccacccacttctcactgccatcggtgcggggcggactggtaaacaggcggtttgcgtctgggaaagcggtgtccagcagggagatcaggttgtttttcagcatggtctgtactttggaatactgctggtactgccggtagcaggtcttcagcatgagccgggtgtcctcttccggaacatatctcggaagtgtgagccagtggtcaaggccgtagttggccagcttcacggcatccttcttgtcggtcttgccccgtcttaaactgttgttcccgtagtcgtgcaccagcattgcattgactacggagacataaagccccgcgccgtggagtagccaggccaccggcgcatggtaattgcccgtggattccatcaccacacgggtctcgccgtccaggcttttgagcagtcctgccagctcgctcagttcattggcggtgtgacgtacttcaaagggtgaaaccactacctctccgaagggccgcatgactgcaatcatgctcttacccttggaaacatcgatgccaacgcagttcattcacattcctccaatacaaagaatctgcaaccggaatccatcttttctcgctgccgattcaatctattgtgtgacacgaactctccgacatccggtggttcaacctgcttaaatcgaacgctgcaacgagaggatggctaacagtctttcacacggacatacaagcccaaggagtgattggtcagccagttg

SEQ ID NO: 350 - DNA, 5953 bp, Flavonifractor plautii
  source 1..5953: mol_type = genomic DNA
ggaatacgtagggctgctggcggggctggcggcggaggcgtcgtccacgggacgggaggaggtcattctgtcccagaaggaccgggcgcgctatggcaagcaggtggtcacccaggccaacgagaggctgggggacggccatttgaccctgtctgtccagacccggcccatccggggcgggctgattctcagcgacggggacgtggaagtgaactgcacctttgaaacactggtgcgcctcctgcggggcgagatggaccggacggttgtggaggtgctctttggctgagcgctccgatagggaggcgaaaacttgagtaagatcagagacacggattatttgaccatctcagcccgcgtgcgggcgatggagaaccgcctggtgacccgggagcggatggagcggatggtggaggcccgcagcgacgacgaggcggtgaaggtgctggccgagtgcggctatgaggagctgccggccctgaccaaccgtgggctggacgagctgctctcggcggcgcgggcggccctgtaccgggagctgggcggcgcggtgcccgacaaacggctggtggagctgtttcagatgaagtacgactaccacaacgccaaggccctggtaaagggggccgcggtgggggcggacgccgaccggctgctgatggagggcgggcggtggagcgccgcccaggtgaaggaggcctttcagcgggacagcctgcgggagttcaccgaccccttccgccgggcggttgtgcaggcccgggagaccctcaatggtggaaatgaccctcaactggccgactttgtgctggaccgggcctattttgcagagatggcggagacggcccgcgcggtgggcagccccttcctggaggggtatgtacggctgctcatcgacgccgccaacctgcgctccgccgtccggtgcgcccggatggggaaggggagcgactttttgagccaggtgctcctgcccgggggaaatgtggaggtccacgtgctcacgtcaggcaagggcaatgatctggcggcggtgttccgggccggtcccctcagtgatgcggcggcggccggcgcggccctcaccgctcccggcagcggggagctcaccgcctttgagcggctgtgcgacgacgcggtgatgggctacctggcccaggcccgccgcatccccttcggggagcaggcggtggtaggctatctgtacgcccgggaggcggagttcaccgccatccgcaccatcctctccggccgtatggccgggctggacgcggacactattcgggaaaggctgcgtgaggcctatgtctaactataaaatcgcggtgctgggcgacaaggacagcgtgctgggcttcaaggccctggggctggacgtgttcccggcggagagcgcggaagaggcaaagcgcacccttcacgctctggcgaaggagaactacgcggtggtgtacctgaccgaggggtacgcggcccacatggaggcggagctggagcggtacaaggacgcgctgacccccgccatcatcctgatccccggcaaggacggctccctgggcatcggtatggccaacgtcaagcgggccgtggagcgtgctgttggggcggatattttgtagctccccctgcggagagggggcggggcgatgtgggcatcgccccctacgcccataacgcgttgggcgccctgtaggggcgggtgcccacacccgcccgcgccgaagacggagcaggccgagggagcggatcatcggcaatggccggaaggacgggcgaccatgaaggtcgcccctacgtccggaacgccctgcggtaggggcggcctttatggccgtccggacccccggcggagcccaacgaagtgggtccggcggggaggaggaggcgcaacggaacgagtgagcgttcccgtttacggggacgcgaaggatgtgcagtttgcgccgacgagaaagaaggttgaagcattgagcggaaaaattgtcaaggtctccggcccgctggtggtggcgacggggctgaaggacgccaacatggccgacgtggtgcgggtgggcgagcagcgcctgatcggcgagattctgaacatgaacggcgatgcggcgtccatccaggtgtacgaggagacctccggcctgggccccggcgcggtggtggagaccaccggcgcgcccatgagcgtggagctgggccccggcatcattgagaacatctacgacggcatccagcgccccctggagggcatcatgcggaaggcggggaacaacaacctgccccggggcgtggaggtgcccgccctggatcgggagaagaagtgggacttcaccgccgtggccaagcccggcgacagggtcaccggaggcgacgtgctgggcaccgtccaggagaccagcgtggtgctccacaagatcatggtgccccccaccctgtccggcaccatcgagtccatccagtccggttccttcacggtgctggacacggtggcggtgctggtggacgggaagggggagaagcacgcgctgaccatggtgcagaagtggcccgtccgcgtggggcggccctacaagcacaagtatccccccagaaccccgctgctctccggccagcgcatcgtggacgccatgttccctgtggcaaagggcggcaccgccgccatccccgggcccttcggctcgggcaagacggtgatgcagcaccagctggccaagtggtcggacgtggacatcgtggtctacatcggctgcggcgaacggggcaacgagatgaccgacgtgctgcgggagttccccgagctggtggacccccgcaccggcgagtccctgatgaagcggacggttctgatcgccaacacctccgacatgccggtggccgcccgtgaggcctccatctataccggcatcaccatcgccgagtacttccgtgacatggggtacgacgtggcggtcatcgccgactccacctcccgctgggccgaggccctgcgcgagatgtccggccgcctggaggagatgcccggcgaggagggctatccggcctacctgtcctcccgcctggcccagttctatgagcgggcgggcatggtggagtgcatcggctccgacgagcaccgccggggctccctgaccgcggtgggcgcggtgtcgccccccggcggcgacctgtccgagccggtcagccaggccaccatgcgcatcgtcaaggtgttctgggccctggacgcctccctggcctacaagcgccacttcccggccatcaactggctcaactcctactccctgtacctggactccctcaagccctggtatgacgagcacctggggccccagttcatggtgaaccgcgacaaggccatgtccatccttcaggaggaggccagcctcaacgagattgtgcagctggtgggcaaggactccctgtccgccgccgaccagctcaccctggagaccgccaagatgctgcgggaggatttcctccagcagaacggctttatggaggtggactggtactccagctacgagcgccaggacaagatgatccagatgattctggactacgacaagctgtgccgcgccgccattgagaagggcgccgccaccgccgagctgttcgccatccccttccgggagcagatgggccgggccaagagcgtgccggacgaccggtacgccgccgtctacgccgacatggcccgggagatggaggagcagatcgcggacatcgccgcccggggaggtgctgaggaatgatcaaggaataccgtaccatacaggaggtcaacggccccctgatggtggtgcgccgggtgtccggcgtcacctacgacgagctgggggagattgagctgcccgacggcaccgtgcgccgctgccaggtgctggaggtcaacggcgacaacgccgtggttcagctctttgagtcctccgcgggcatcaacctggccgagtccaaggtgcgcttcctgggccaccccctccagctgggcgtgtccggcgacatgctgggccgggtgttcaacggcatgggcaagcccatcgacggcggcccggagattctggccgaggagtaccgggacatcaacggcctgcccatgaaccccgccgcccgggactaccccaacgagttcatccagacgggcatctccaccatcgacggcctgaataccctggtgcgcggccagaagctgcccatcttctccggctccggcctgccccacgcggccctggccgcccagatcgcccggcaggcccgtgtgctgggggacgacgcgggcaacttcgccgtggtctttgccgccatcggcatcaccttcgaggagtccgacttcttcgtacaggagttccgccgcaccggcgccatcgaccggacggtgctcttcacaaacctggccaacgacccggcggtggagcgcatcgccaccccccgcatggccctcaccgccgccgagtacctggccttcgagaagggcatgcacgtgctggtcatcatgaccgacatcaccaactacgccgaggccctgcgcgaggtgtccgccgccaagaaggaggtgcccggccgccggggctaccccggctacctctacaccaacctggccaccctctatgagcgggcggggcggcagctgggcaagagcggctccatcaccctcatccccatcctcaccatgcccgaggacgacaagacccaccccatccccgatctgaccggctatatcaccgaggggcagatcatcctctcccgggagctctaccgcaagggcgtcatcccgccggtggacgtgctgccctccctgtcccgcctgaaggacaagggcgtgggccccggcaagacgagggaggaccacgcgggcaccatgaaccagctctttgccgcctattccaccggcaaggagaacaaggagctcatgagcatcctgggcgaggccgccctgtcccccaccgacctccagtacgccaagttcgctgacgagttcgaaaagcgctacgtggcccagggcagcgacgagaaccgctccatcgaggagactctggatctgggctgggagctgctgagcatcctgcccaaggcggagctcaagcgcatcaagccggagttcattgagaagtacctcccgaaaaaggaggggtaatccatgcccgcgattaacgtgaaccccatgcggccggccgcatgggggcccctggatttcccattctcgggcggaatgaatccgccctgcggaaatcgcctgcggcgcttttgcggcgcaaaagcgccgtccccgcgcggcggggcccctctgaaggctgacggtggcgcaaggagaggaggggtaatccatgcccgcgattaacgtgaatcccacccggcaggagctgacgcggctgaaaacccggctgagaacctccatccggggccacaagctgctcaaggacaagcgcgacgagctcatgaagcagttcatggacgtggtgcgggagaaccgggccctgcggaagagggtggaggaggggctgatgcgcgcccacggctccttcaccgtggcctccgccctcatgtccaccgagatgctggagcaggccctgctctaccccaagcagagcgtggagctggacatgaccttccagaacatcatgagcgtcaatgtgccggtgtaccacttcaagaccaagagcgacgacgccggggaaatctacccctacggcttcgccaccacctccggcgaactggacggcgctgtggaggccctgtccggcgtgctccaggatatgctccgcctggcggagatcgaaaagacctcccagctcctggccgaggagatcgagaagacccgccgccgggtcaacgccctggagtatgtaaagatcccccaaatggaggaggccatccagtatatcaccatgaagctggacgagaacgagcgcgccaacaccatccgcctcatgaaggtcaaggacatgttactgaaagaggccat

SEQ ID NO: 351 - DNA, 5115 bp, Flavonifractor plautii
  source 1..5115: mol_type = genomic DNA
gtcttttttaacgaagaaactggccgagagattatctcttttgccagatctgttgccgcgagccggctccttgcggagcctgcatatggtccgtgaggcctgcctcttgcgcagttggctctcatgtagtacaattttccttgtccatcgccgcttccatgccggaagggctccggagtgcgagatggaaacaatttgctttgtgtatcatgttaagcagagaaagaaaggagttgtccccaactatgacaaaaaccgaactgatttccgcgatggctgccgagtgcagcctctccaagactgacgccggcaaggctctggatgccttcatgcaccaggtaactgttgctctggcctccggtgagaaggtcattcttgccggctttggtgtattcgaggtgaaggaaagagccgagcggacgggtcggaacccgcagaccaaggaggagatcctcatccctgcgtcccgcacccccagcttcaagcccggcaagcctctgaaggaggttatgaagggctgatgcccctttggcgagaggagtagtctgctatgtgcgggctgctcctttttctgtgctgccaatataaatgttggctgttgcatatgaacctccccagggctaaagcccggggtttccacgagcttccggaggaagctcgtgtggtggcagtatcgtctacgggacgacttaccggaaacttggcggcaggttcatttttgccaattggcccagaaagacctcctgcccgatggcaggcagcctccccagggatctgctaggacaactgcatttcgtccgggtccccagaaacgccatcgtctagtgacgctcccaaagcccggtgcagtggatagcttcgcagaaacattgtttgtggttctatctcatttaacaagggccttccgcagtgcagcggccgtcttatattcctggtagttgagcttgcggtagaagcaatgagtagggatcttcttggtggccttatacagggccgcccagttgctcagatggaagacggggatggcaggcttgcggatcaggtgcatcagctctgccggcacatcctcctggaagcccatagcccggcggccaatgacataggccgcagcctcgtggacagacagtcccatctggcgcatatacttgagtttcccgatctgggaggtataggctggattcacggcccgtacgaccagatggtacttctggctcttgcgcccggccaggtaggtcatccgcccatgcgcgaactcgctgattttgcgattcgcctttttgttgccatacagcaggcacttgtccgggttgtccaggtcctccatcgcaatgggcttgttggccaccgcagcctggcggaagacctgctccaatgcttcagagatggcattgtttacctggtcgcttgtgcggcccgccatccggaaccggacgacccggtggttcagcaggcagcccttaccatccagttctgccacagccaggtggtcgtagttcatatcgaaggctacgcagccttcatcgaagcagctgttcaggtgcgggtccgccggcaccgagatcatgcactttaccagaaaggcattgccgcagtctctgatcgaccaggtgacagggcccggcttccagccctcaacttgttggtcgagcggcagctttttgttccgaatggcgatgtcgtgggcggcgactgctgcttccaccagctgctgaccatgcgggaaatgcaccccatcgatgaccacctgccgaccccgtatcgatttatacgaaagctggtgggttgctatatcatagcgagccatccagttgccgcacttggagtccttgcggcccaccagggtgagttcccgccggcgcaggtcatgccactccttgcgccaggcttcgacctccttgggcgtcttggcctcgttgcgccggcggaggtgagccttgccgccaaagcagatatggacgatacctgccttctgctcccgccgcagccgctccagccggcctttgaggtcgtgcaggcgagcatgcatgtttgcgatctcctgcttcagacgcctgatccgcaggtccagatactgcacctcgaacaggtactcggagctgtatttctggggcggccgcttcttatggatgccgccgaccaggaaccacaggctgccgtcctggtagtgctttggctggacccagttcccaaaggggttctggaaaggcggcggcagctctttgtccttgcgggcccggctgcgggcagccagctgggctttggcattcatggcccggttcagctggtcggtcttctttttgatctgggcttcgattttagggatccgctggacctttgtctttatatcgagagccagagcctccttggcagctgagatagcgcctttggcaacctgctccatgctgccaactatgtagtcgctgaggcccagctttttgtactgcacatggaggctgtccgcgtcctccggcgtctcctgccggtgcagtatgtcgccaaccatagcccggacatgatgctcgaaggcgcccatatcgcgggtgacatctatgagcgcaggtttttggagggagcttttctttatgagccggctctgcagggtgatcatatccatggcctcctttcgaggatagttttgctattttgcttatataatatgcaaactgcacaaatcgtatatgcgcaaaaaaacatcccccccccgacaccggggggtgtagtccaatatttgcttgggcatttgcacgcaggcacggatgccgccttatatccctacagctaaagcagagggttttacggcggctatagataacaggcaaggagaagaaaggagctaaggagctgttgtttcccatgcatgatttcatcttttttgccgttgttgcggagctgtccagggctgtctgccggttcacctgctgggtggtgacaggggtcatttcgcttcttcggaagctgtttggctggctcgcagttaagatctttcgggattcccggggttctcagaaataggcgaaggtacgcacctcgctgcagactgaaaactctgcacagacggaaatgcggaaatggcaagctgcatataatagttgcagaagaaaagagagtgctgcccatgcagatcgaagatgtagttctcatcctcattggcatcgtgtagactgccggccttggcatcctcgtctgggtctaatggccactcttcgcaagaaaggagtcgcattcccatgcctaccgcaaatatcattctcatcatccttgccatcatcgctgtcgtctgtatcggcatcctggctgctacccattttgccgcagccaaacgaaagaaggagttgccccgggagatcggggtcgtcagcgtcgtaatgaccagcagggtgccggggcgggaacagtaccaaatgtccattatgcgccacggccggccaataacgacctgcgtttcgatgccatgcaaacggggcagcttccgggtcggcgccaaggtgccggtggcggtggagacaatggtgcgccggggtgtgccgtacaaaatcgcgtatattttgcagaaaagctaaggagggttcgcatatgcgggctgaggttgaaccgcatcggcgtaccggccagcaatgttttcctagatcaattcggcgatgggctccttctcccctatccgaacttactcgccacctgacaaaaaatcccctggagggcttcctccaggggtgttcttttgcgttcagccgcccaggtagtcacggatggcccgccaggtctgcaaattgttgtacaaaacctcgtggcagatgcggcggtgggccacggtctcctcctcgggtgtcggcttagggatgccaaaatcgcaccggagtttctcggcggggataaagtacttctcttgttcctccttgggcttcttcagcacttcctccagctttttggcccggcggtcgagttcagcccgctcctctgcgatcttctcctcactgtatccgcaaaaggtcatctcccagaggatgacttcagccaggtccagggcaccgatggcagcgatgttccgtttgtccacctcatagccaaggatctccgcccaggcggacaggtcgtaggcatagttttgcgggttgggctggaggtgggacagccgatccagctcatcatcggagagtccgtccgtatcggagagggcaccgatctcggaatcgaggtcgaaatcggagagcagctcgtccttccggaagagggatgcggagagggactcctcatcgtgcatcaggtgccgaatgcccaggatgatatggttggtctcgatgggttcgatgtcggccagtttctcgatgaaggcagacatgttggcgatggccgtctccaggttgccgtcgttgatctgtgtgtcgggcatctcccgaagctgggcgatatgacgggccgccagctcatgggtggggacagaaaagatgagttctttggcgttcatgtttggggaaacctcctttttggttggctgattgttgcgttctacaggtctagcgaagcgacctgtgtggcagacctagcgaagcggtctatgtggcagggatgatatgcacgccggattgataagcggggcggcgcacactcgtgactttagtcgtgagtaagccgccccaatattttttgtaatttgtgccgcaaccgtagattttccccatacatatggtataataaatatatggacaaagagcttattgttacaagtgaaactggcgttacgcatggtaggggctatgtctaccttctgcagtatcacattgtgtgggtgaccaaataccgcaagtcaatcctcacgggggacattgccgcagacacaaggcgccaccttttaacaaccatgagcgagctgcagatggactgccttgctatggaggtaatgccagaccatatccacctgttagtcagctgcaaaccgcagctacggctttctgatgccataaaggttttgaaaggcaacacagcccgctggctgttcatgggacacccagagctgaagaactctctctggggcgggcatctgtggaacccatcctactttgtggtaacggtcagtgagcgcagcacagtgcaggtggaagcatacatccaaagccagga

SEQ ID NO: 352 - DNA, 2521 bp, Flavonifractor plautii
  source 1..2521: mol_type = genomic DNA
agcggggagagcctgcctttcgggctggactgctccggcttcgtatcctggtgcgccgtcaacgccgccggagaccccgccgcctttgccgccgtgggcaacggcgtgcgggcccagcgggccctgtgcgccccggtggactgggccgacgccctccccggcgatctggccttctatcccgacctgtcccatgtggggatcgtggccggccggggagaggacggagggcttctggtgctccactgctcctactccctggggggcgtggtgtgctcctccgacgccaaggccgcgggctttaccgacctgggccgcccctccttgtttgaaaaaacgccctgattccacaaaaggattgacgaaccgccgcaattccagtaaaataaaaccaatcacttttatttggccgcagcagtttgctgcggccctgttttggtgtttggaggtcggttatgtcagaagaactgcgggaaaacaaaatgggcaccatgccggtccggcggctggtgctctccatgtctctgcctatgatgatcgccatgctggtgcaggcgctctacaacgtggtggacagctatttcgtggccaagctcagcgagaacgccctgacggcagtgggcatggtgttcccttttcagaatttgatgatcgccgtgggcgtgggcaccggcgtaggtgtgaacgccttcctctcccgcagcctgggggagaagaactatgatgccgccaaccgcgcggcggaaaacggcgtgtttttggcggtgctctccacgctggtctttacggtggccgggctcaccctggcccaccccttcatcgccgtacagaccgatatccccgatatcgtctcctccggcaccgcctatatgcgcatctgcggcggcctgtccttcgggctgttcctggaaatcatgttcgaacggctgctccaggccaccgggcgcaccttctacaccatgctcacccagggcaccggggccatcatcaacatcatcatggacccggtgctcatcttcggcctgggccccttcccccgcatggaggtggcgggggctgccgcagccaccgtcctgggccagatcgtggcggccgtcctggcggtgctgttcaacctcacctgcaaccacgatatccacccaaccctccggggcttccgccccaacggcccggtgatccgaaacatctactccgtgggcgcgccgtccatcattctcaactccatcggctcggtgatgaccttcggtatgaaccagatcctgttcgccttctcgtccaccgccgtggccgtgttcaatgtgtatttcaagctccagagcttcgtgttcatgccggtgttcggcctcaacaacggcatggtgcccatcgtctcctacaactacggcgcccgtaagcgtaaacgcctagtggatacggtgaaattcagcgccctcctggccgtggccatcatgctggtgggcctggtggtcattcagctcttcccggcgaatatcctcggcctgtttgaagcgtcccccgacatgctggccatcggtgtgcccgccctgcgcatcatcagcctgtgttttgtctttgcgggcttcagcatcatctgctcctccaccttccaggccctgggcaatggcctgctgagcatgatgatctctattgtccgtcagctcctgatcctcctgcccgcggcgttcttcctgtccctcagcggcagcgtcaccgccgtctggtgggcctttcctatcgcggagctggcctctctggccctctgtgtgatcttcctgcggcgtatctaccgcagggtgatcctccctctggagtaagcgccccgccgtctcctgcatacaggggccgcccctacctttccggagttccgtttccagcaggctattctgcggcgcttggacgtagggtcgggtgcccacacccgcccggagctggccggtggcccggaggtgcgggccgacgtgggcgtcggcccctacagaggtctgctgcggcaggcactgcccggccaaaatgctccgtaggggcggggcttgtccccgcttgcgggcggccataaaggccgcccctacttccggggctcgtctccggcgggctgttttgcggcgcttggacgtaggggcgggtgcccacacccgcccggagctggccggtggcccggaggtgcgggccgatgtgggcatcggcccctacagaggtctgctgcggcaggcaccgcccggccaaaatgctccgtaggggaggggcttgtccccgcccgcgggcggccataaaggccgcccctacatttccggggttccgtctctggcgggctatcttgcggtgctcgaagcatgtaggggcgggggcccacacccgcccgcaggccgttcggcaggacaaggcccccgcgtccggcggtacgccgtgcgcgggggtgcttttatctccagaggaggtaatcagaatggcaaattatacacagcactatcacctgcaccagtgggagccggaggacagcttcctccgcaccgacttcaacggagat

SEQ ID NO: 353 - DNA, 2280 bp, Flavonifractor plautii
  source 1..2280: mol_type = genomic DNA
gggggaccccctgcgctcggtccactggaagctctcctccaagcgggacgagctggtggtgcgggagaccctggagccccggcagaccaccctggtgctcacctatgaccacttcggcgcccccgcggcgctggaccagaccttcgcccggctgtgcgccctgtcccgggccctgctggagcggggcaggccccaccatatccagtgggccagccccaccggcggcggcgtggaggggcggctggtggactcggagcgggccctgctggcctgcctggagctggccttctcccggcccgccccggcggagggacgctccatcctggacaccgccctgcgcctgcccggccgcgccggtcccctccggcacatccatgtaacgcccaccggactggaaggaggtgcgccatgaagcgcaagcgccgcgccgccgcgcctctgcggcgggggcccgccatcctgttgggggacggctgcctccttcttctggtgctggcgggcaccgtcttttccttccttaccgccttctccgtccagattcacgcccttcccctgctgctgggctgcgccgccgccgcgctggccttcctcggcctctggtccctcccccgccgctggtgggcccttcccctggccctgctggccgccgcctggctcctggcggtgcggcggctgtggcagccgctggccctgggggccgatgccctgcgggtggacgtggtcaacaccgtttccgccagcctggagctgggcttcaccctggagcccgccctttccctccccgaagccctctggaccaactgcgccaccctgctcgtcctcctggccctggtaccgctgggcgccctgctggggctgggcgtcgtgcgcctgcgctccttctggctggtcttcgtcagctccttccccttcgtgctgctccccctgtgcatctcggtcaccccgggctggctgcccctgatggccctggtgctggggtgggtggtgccggccctcacctccctgctggcccgcacctcgccccagggggccgcgcgcctcaacctggccgcccttccggccgccgccctgctgctggccgccctcagcctggccatgcccatggacacctaccagcgccccgcctgggccgaccgggccctacagcacctcaccaatcaggccgtccgcctgggggacggcctgctggaggggagcggccccttcggcattggcagcggcgggggacggctggccgacgccgacggctccgtctctctctccgacgcggggccgctgcgcttctccggacgcaccgtgctggaggtggagaccgacctcaccggccgcatctacctgcgggggctctccgacgcggtatatgacggcgagagctggaagccgctggatgaggcggcctacaactggcaggcccgcctccgcggcgtcacatatggagcgcccgccgcgccggacacggatctcggcgccgctggagctgagtccctgttcgcccggttccagcccatgaatttccccgccctggcggtccgggacgcccacccggggagcccctacgccaagatcaccgtgcgcaatgtgggggccgatccgggctatgtctacgttccctaccatatcctgacccagcccggcgagctgtccggggcggaattcgtccacgacgcctatctggcccgggcggcccgggtgtggacccacaccgtctacgtccagcccgacgcctcccccgccgcctccgcgggcctgcggggggagctgtctctggcggaggcggcctacgcggacttcgtgcgggagtactacctccaggtccccctctactcggaaaacccggcgctccgccaggcgctggacggcgcgttggagccgctggccgactggctgcggcaggcccagtacgcctcccccgcctctgtgaagcagccctatgcgctggaagccgcccaggtggtggcggactacctagccgccgtcgcggaatacgaccccgacacccccgccgcgccggagggggaggactttgtggcctggttcctcaccgagagccatcggggctactgcatgcactttgccagcgccgccgtgctgctgctgcggagcatgggcgtccccgcccgctatgtctccggctttgtggccgacgtgcccgcctccggccgcgtgaacgtgcccgactccgccgcccacgcctgggtggaggtctatatcgacggctacgggtgggagccggtggaggtcacccccgtctacgccgggagcactcccggccagagcggc

SEQ ID NO: 354 - DNA, 2006 bp, Flavonifractor plautii
  source 1..2006: mol_type = genomic DNA
gcagggcaagcacctcatcaaggtggataagtggtacccatccagcaagacctgccactactgcggcggctactacaaggatttgcagcttggcgaggaggagtgggtctgcccccattgtggcaaacacatcctccgaaatcagaatgccggcatcaatatccggcgggagggcatccgtcagttctatgcagagcgggcggtggaacctgtgactttcttcgaaagtcatgcggcagcatcataatcgcagtccaaaatattatcttttgccggtaggagcaccggcctatgcccgccattctaggcagcacggacgggaaccgtgcctaacatgaccgtcgaacgggaaaagagaatgcataccctggcctatgccaggatacgcctgaagcccccagctttagccgtgtagggttagcgtaacgccctatgtaggggtagctcacgaaagacgcctctctacggaaattcgcaaagcggcatccgcatataatagatatagacagggacatctctgttcccaagagaggaggaactggcacatgaacaggctgttcgtcactggagatatgcactgcaacgcctgcggggaattctccaagctgaatacgaaaaacttccccgtccagaaagaactgtccaaggacgactacattctgatcgctggagacttcggctgcatctggaatggcagcacagaggaggagtactggctggactggctggagaataaaccgttcacgactttgtttgtagacggaaaccatgagaaccacgcccggctggcccagttcccagtggaggagtggcatggcggtaaagtccaccacattcgatcgtccattctgcacctgatgcgcggtcaaatcttcgatattgccgatctgaaagtctttgccatgggcggtgcctcatcccacgatatccgggatggcatcctggatccggacgacccattcttccgggacgactaccgcaagctgcgctcccagaacgctctttttcggatcaagggctggtcctggtggccggaggagattccatcccaggaagagtacgacgaggcagagaagaacctggatgccaatggcagagctgtggacctgattgtttcccattgcgcgccatccagcatctctgatatcatcagtggcggtatgtaccagctggacgagcttaccgactatttcgagaagctgcgggacagtgtagaatacaaaggttggatatttggacactaccacgacaatcaggtcgtgcagcggaaacatgttttgttatacgaccaggtctgcgaggtctttgctaagactgagtctggcaactttggcatcctgcctgtctaatattctggcagcagggagaggggtacgcatcttttttaacgaagaaaagaggcggtggaactcttctttgcccgaggccctcatggcagccggtccctccgggacctgatgtatggcgtgcgggccagcctaatcgagtgaactacccacgactaaagtcgcgggcttccttggcacgcagggataacgatttgaagtattgtccctgaatacgaaggctttcctgcttcctatgcctggcgcctaccttgcgggcaggtcttaccctggctctccgccgctggacttccagcggcggtcagcatttcctgctgtgcaggcttatagggatcttccccctggctcccacggtcccccgaggtaccaaaaataagtaggtggttgatacttctgcacaaaagatagatagatgcaaattgtaggttggtaggtacagcttatgggaggatggttacgccggcggccttcaggtctttgacgcctctggcgaagatattgtccttggcgttgatatcccggtcgtgatagactccgcacttggggcaggtccacgctcggacggccagatccttgacctccgggttcttgtacccgcagcaggagcaagtttggctggatgggtaccaccggtctacctggatgagccacttgccctgc

SEQ ID NO: 355 - DNA, 1742 bp, Flavonifractor plautii
  source 1..1742: mol_type = genomic DNA
agtccaatggtattaagtcaaggggataatacgagaaaattttgaggaaaagtaaagcaaaacggatgtttagagtgcaaaaaggcaacacccaataaagccctgcccctataatttttgaaacagggccttggcgtcagagaggcaggcgatatcgcttagccctccggcgggatatacaggcggttgtccttcagcagccgaaagaccaaccgaaccagttttctggcagttaaagcgagtgcgcgtttgtgctggtacttgttaacctctttgaatttgaggtcatagtagcgccggaactcggagtcgcatcttctcacagagttggcagcttccaggaggtagtagcggagatagcggttgcctgatttaatcatccgggagtgttctgcttcaaattcaccggactggtgctgtgtccagacaaggccggcaaacttggcgacagaggcttgggaagcgaaacggtggatatcgccaatttcagcgataataccggcggagtaaaccttgccaacgcctggaatagaggtcagggtatttgggataatctcaaactgttgttcaatagctttgtccagaaccttgacctgttctttcagcgcccgcatggaggcgatagaaacggccatggcctggttcacggtgtcgttcactgttttaggcagacggtaagaacctctggccgcagcctgtacagccttagcggtggattctggatctgcaaatctgccacgccccgtttcagcaacaaaggcagtcaggtcatccagatcagcatttgccaggttgtctaccgtttcaaaccgctccatgagtgcaatggtggtggcgctggtattctgaatacccttgtcctgagccatgccggagcatttcagaaataagtagttggcaaaccgctgcttctcgcgggtcagattctgaatgacatcaaatcttgccctggtaagggttctaagtgcctggtagcgatagtcgtccatataaacctccttggcaatcctgccgaagcggagatggtcggcaatcacaaaggcgtccacccagtcgttttttggcaggtcaggataggcttccttgaactttttgacctgtttcggattgaggacatggattttccgccggaaccggcccagaccgccatcttcacgaagagcatagaccaaattgtccccgtagatggaggtagcttccaggccaatcaccacatcactgagccgcatagagctgagtgccgacacgattctctctgacaacagtttagcaccaccgaggttgttctgcacagagaagctggagtgtttgctgccgtccggcttcatcaggtaggctacattgttcttgctactcacatcaatgccaacgaatagtggattcacacttttcacctcccctcgtggagatttcaggccagcaggctttgagatacccatgataaccggagcatctggcaacctcgcatatcagaatcattccggagcagaccaatgcgatatccctcactgctgaaagggcggtcttgtcttcggcaaacagccaatgagtttgcagctaacttccggctcagggggacggactttcaatgaagcagccttgtggctcaacgaggagcaaaagaacttgaccctactgtcctacagctattgtatcacgggtatctctaagcctgttggttacacggagtgaactaagcagatacacttaaaaatcatctgcaaatcttattatacgaggag

SEQ ID NO: 356 - DNA, 1721 bp, Flavonifractor plautii
  source 1..1721: mol_type = genomic DNA
cctcctcgtataataagtttcaaagttaatagtttcaggtatcagcaggctttgaggtgcccgtgatacaatagctgtaggacagcagggtcaagttctgagtcctccggttgagccgtaaggctacttcactgaaagtctgttcccctgaaccggaagttagctgcaaactcattggctgtttgcctgggacaagaccgccctttcagcagtgagggctatcgcattggtctgcccaggaatgattctgataagcgagggtgccagatgctccggttatcatgggtatctcaaagcctgctggcctgaaatctccatgcggggaggtgaaaattgtgaatccactattcgttggcattgatgtgagcagcaagaacaatgtggcctacctgatgaaaccggacggcagcaaacactccagcttctccgtgcagaataaccttggcggtgctaaactgttatcagagagaatcgtatcggcacttggctccatgcagcttgagcgtgtggtgattggcctggaggccacctccatctacggggacagcctagtctatgctcttcgtgaggatggccgcttggggcggtttcagaggaaaatccatgttctaaatccaaagcaggtgcggaaattcaaggaagcctattctgacctgccaaagaacgactgggtggacgcctttgtgattgccgaccatctccgtttcggcagaatcaacagggaggtctacatggacgattaccgctacaaagccctgcaaacccttaccagagccagatttgatgtcatccaaaacttgacccgggagaagcagcggttcgccaactacttattcctcaaatgctccggcatggcccaggacaaagacattcagaacaccagcgccaccaccatcgcactcatggaacactttgaaaccgtggatgacttggcgaatgccgacctggaggaactgactgcctttattactgaaacaggccgtggcaaatttgctgacccggatgctaccgccaaggcagttcgggctgcagccaaaggctcctatcggctgcccaaaacagtaaacgacactgtaaaccaagcaatggctgtttctattgcctccatgcgcgccttgaaagggcaggtcaaagtattagataaggccattgaacagcagtttgaaatcattccgaacactttgacctccatccccggtattggcaaggtctactccgccggtatcattgctgagattggtgatatccaccgttttgattcccaagcctcggttgccaaatacgccggccttgtctggaacaggagccagtctggcgacttcgaggccgaacactccagaatgattaaatccggcaaccgctatctccgctactacctgctggaagccgccaactccgtgagaagatgcgactccgagttccggcgttactatgacctcaaattcaaagaggtcaacaagtaccagcataaacgcgcactcgctttaactgccagaaaactggtccggttggtctttcggctgctaaaggacaaccgcctgtatatcccgccggagggctgagagcgcagcttgccactctgactcataggccctgtttcaaaatttctcagggacagggctttggttggtgttgcctttttgctgtctacacagtgctttttactctgtttcgcttaaaattttcttgcatcacctacttgacttcataccattggactt

SEQ ID NO: 357 - DNA, 1641 bp, Flavonifractor plautii
  source 1..1641: mol_type = genomic DNA
aaatagaatgggaaccagtttagatttattcgacgccctgaaggggatttcggggtacatggatctcccccaggagatcaaggacatgcttccggcccttgtggacacggcagggaccgtgatctcctatggagacctggacaccaagagttctcaggagctgaaagacatgatggacctgccatttgttgatgagcagccgcccggtgagcccctcgaactcgatgaggaactgatcggcgaggagatcgtcatctgggtgctggaaaagcacaacaacgatgttgtcagcgacggcgcggtcgtgcgcgtgagcggcgtcctggctgaattcagcgactatgatgtgatcctgaaggacggccggtgcagcggaagctgctctgtgtccaagcagatggatggcagcatcattgtggagcgggagaaaatcatctcgattaggcgagcatgagaaaatgggccccagacgaaagcctgaggcccattctttgtttttcgatcagccgaaccgcagcagctcggccacggtaaaggggaggttgcggaagctcttctcttccaggtactctgcgacaaatttggcgaagaactcgctctcccggccctctttcgcagcctggaattcgatatcctccaggtcctccataatgtccggatgctgccggcaccatttgcggacggcgtccttggcggtcttgtcccgctcctttttggcggggcttctggttttgtaccgccagaccgcatgcgccttttccttggagcggtagccgtagccctgggcgtcgtccaagaggtcgccggcctgggcgtccacgacaacgaatcgggactcgtaccgggacgagagttcttcgctgcgtacaatgcgatagtttttctctcccgccatgggttagtacctccttcgagtttgtttcgtttggtgcgcctccagggattcgaaccctgacggtccgccttaaaagggcggtgctctgccagctgagctaggggcgcataggggagccccagggtttgctgcaagacgggcaggaaccgaaatacggatcctggaggcacaagggccacagcaaagattcccgagactcctggcatgggtgggaggactcgaacctccagcctatggttttggagaccattgctctgccaattaagctacacccatatgttagccatgcggttttgcgccactagcgaagcgggtcgtgtgggagaccagtgctctaccaactgaactatacccatatgagacggccgccacagtacggcagccatggtccctctgtacagcttggtacaggggatattttttgtccctgaggcctgggccgtgcctgttttgtcttcgcaggactacctcctcgccgcaccaacagcgctatcggattggctcctaactggccgcttggccgggcatgctgagagccggcacccaagactacaggaacataggggacgcgcccctggcggagagggtgggattcgaacccacgagggcttgcgccctatcgattttcgagaccgacgcactagtccaggctatgcgacctctccgtatctatatatattatatgcagttgcgacgatttatatttcggattagccgatgcgggggcatcttttttaacgaagaaa

SEQ ID NO: 358 - DNA, 1292 bp, Flavonifractor plautii
  source 1..1292: mol_type = genomic DNA
ccgtgtctccgcctccctgaacaggacggggcggttggtttccatctgccgcatcagccatgcgctggcggacagtccggcggccctgttccgtttcttcaacagatcgtattcctttgcgctcatgcggacacaggtgcggtgtggttggctattgccaaaccttattttccgaggtaccaatgttgttccgaaatgctggccggaaatggatttttggcaacgctgtcagaagtccacctttccccacccaaaatcgcttttggcaatattgccaaacccggtttcctagcacaaacttgccggcagtgctgccaaaaagtcccgtcgattggcggcattggggtcaggggatttcccctgcaagtggcgttttgacatcaaaatgcgatgcttgcgccaccaaaggtcccgcattgcgggacctctggcggtctctccgccacgggcggggttttctcttaatggagagcagaccgtctctgtatagcacttatgttttgaaaaaatgggtctggccccaattttctaacaaacatttttatcgtctctgagaaatttaacggccggactgaattttcaatttctcttatgctttccgatcgatcccttggtgatattcatttaagataccgggcttaactggctttccccaattccaagacgggtcccgctgatgcacatattctcccaaacgcttagcctcttgtatactgatttgatttaatgtccatccggcagcggctctttcttcaggaggcaacgacataatatagttttttataacttggctttcaacttctccatcactcattccgccgttgtttttcatgttctcaaacaccagtgctctgatcctgttcgcaacgtcctcgtcaacaggaacgatccgacggaaatccgtccgacctgtaatatccattccttctgggcaatatgggttcacgtggtcctttggaggcagagagccgttgggaaggttttgcgtaacgccttgccgcctgtacctgtccgcatttgccatcatcctggcaatatcgctgaccgtcatcgtttttcctccttctgtcttattgtttagaactggtatttatagaatcgactgactaagaaaaaccaaatactgcgcatatcttttatttaaaatatcgacagctctttattaaaagtttagtgtgggttaccagtaaaaagtaaatcatttggggaaaaatccatactttctactgttatctatgtatcatgccactcgcagcccttcgctccccgattttcccatgccctacactctc

SEQ ID NO: 359 - DNA, 1232 bp, Flavonifractor plautii
  source 1..1232: mol_type = genomic DNA
ggaaggagaatactgcggcgggaaaattctctatgaggaagcatttccgaacatcctctttgctgttgacggcgagatttacaatttcgatgggtacaagtgtatcgtgatcgggggcgcgtacagtgtggataagcactaccggctggcgcacgggtggcattggtggccggatgagcagccggacgaggagatcaaagccgtggttgaagcgcggcttgccgccttacactggaacatcgacattgttttgagccacacctgcccccgcaaatatgagccgaccgaagtatttctctccagccttgaccaaagctccgtagacaagagtaccgaggactggctggacggcatagaggaccgcctggactacaaaaaatggtactgcggccactaccacacccggaaacaggtcgacaaaatacaattcatgtttgaggactttgacacgatgtttattcgtctatgaataaggtattctatgttacctttcccggctacggggagcgttagcgattgacaagcatccggcgtaccgatacaataaggaaaatgaagcagaaaggacggggtaagagatgggccgacaggatatgatggggcagcccggacacgataccggcctaccagctgacaagagttatctggagtgcggcctgcctgacttcctgcgggagtccatcgcgcagatgcaggcggcctgggaccggctggaccggggtgagaaggacctgcgctgggactgcgactactgcaacttgcaggcagacatcaacaacgcggaggtcaatcaggtcatcagctcggaacaggcgtggtatctccgggaaaagtatctgcggatggaaagggagtgaccgcatgggcgtcattgactttacagatatgcaaaaacggaacaaggcatacgccggcgcaaacggcaagaagatttccgtcctctatgacggggagcaatatatgctgaaatttccgtctatggtgaagaagaacccggacatgagttaaggtacccccgcacaagggcaatattttaaccgcatgagagcattgttattgtagatagcatagccgatatgagacagataaagatggtcgcaagccattaagggctttcaaaacagctatccttatcaccacgatgtttttcaatcatgactgatgcggtagttgttgaaacaaatgtttgaaaatgatagttaccgaaaactgctgctgtatactgggcggct

SEQ ID NO: 360 - DNA, 1095 bp, Flavonifractor plautii
  source 1..1095: mol_type = genomic DNA
cgctgcatcttatatttcaccatagtaaagaactggccccacgccacagaggatatctccctggacagccttcggttctttaccatgcccttgatgtggaggtcctcacataggaaggctgagtaccggtccgcgattttgcggctcagcttgtgctgaaaatccttcctctggtttttgaccttgcgctgctcagcggtcacgcgctttttggccttctcccagttcttggagcccttatgggttttcttgtcatactgcttccgggccatggattgctgcagccggcgcaggcgcttcgcgtggaggcggatccaccgggggttttcaacctcctcctcccagccctggccgccgataacggcaaaccgcttgatacccatgtcggcggcaaggatgtcactgacatgcatctccatcagctgctccggcttcgggatcaccgcctccagctgcagggaaacggtgtggtggttggtctcccgccgcaccacagcggaaaggattgccgttccctccgggataaggcttgcaatcgtctggcccttcggcaagacgaagcgtatctttcccgccttggggagcttcacatagggcaggccattctcctccaggatagcaatgttgccattggtatacttggtggtgtaggagttgcctgccggtttccacttggaggcgtacttcgggagtttggcacggccggcgaaaaagttcttgtagccggcgtccacatgctccagagcagcctccagggcaaacttgtcggactcctgcaggaaggggaaatccttcttcagctgcggcaggtgcttggctttgtattcattcaccgagagggttttcttggtggccttgtagtagttcttccggtcgctcaggtagtggttgcgcacgaacctggcatttccaatctgctgagccagggcctgcttctgagcggcgtcggggagcagctccagggtgatgccgtagtcatgcacgatgcagttgtacggctccaaggccttgtttttggcctgggtgatgttaatcgcccggccggaaaactggaactgtccattaaccttggttgcggtcaccgccatgagaagc

SEQ ID NO: 361 - DNA, 1089 bp, Flavonifractor plautii
  source 1..1089: mol_type = genomic DNA
gggttggaggaggtcagggcggagttggagaccgccgaggacggtcgacggcgggcgctggaggggagggccaagctgctccggcagatgctgaaggagatgcgggatttgcgccaactggccgaggggtattataccaggccccgggacgggacctacagcatgtcccagatctacgcgccccgggtggacagcacgaagcagtgagggggtgtggaggatgactgaggcccaggaggtgcgtgcccgggccaaggcgctgcgggagcgccgggaggagctggagaaggccctggcgggggctgcggggccgggtgcgcgccccctgcggctggagctggcccgggtaaaggaggagctggtggactgcgcccggcggctgaaggagctgatgccaagccacaaggtacgctgccgcaccacttgggcgggggtggacggatggcagtgggacaggtttcagtatcagacctgggccgagctggagggcgccggggagcaggacggccccacggagctggaccgcatgcgcctggccgtccggctggcccgggagcgggcggtgacggacaagcagggggagtatctggcccaggtagagggagggaaaaaggccgcccaggtggcccgggaggcggggcgccaccgggggacagtgagccgcaccgtgggccggggccgtacaaagattgccaaggaggcaaaggcgctgtatgaggtactccaggcccagcaggggccggggccgctggtggtggatctggcggacggccgggtgctggaggcggtgctctccctgctgacgccgcggcagcagctctatctctatctatactatggggagtggctgagcctgcgggagatcggaaggctgctgcgggtagaccacgcctcggtgctccgctccatccggtgcgggctggagcggctgggaacgctggcggtgggaaccagggcggaggtgcgtgggctggaggagctggaggagcggctgatggcccacttcaaccagttggagccgccggaggaggcgctgcgcccccggcccaaggcaccggccagggcgcccaatccccggcggcctccggc

SEQ ID NO: 362 - DNA, 977 bp, Flavonifractor plautii
  source 1..977: mol_type = genomic DNA
agcccggttcaggtagcggtcggcggcgatcagttctctgatacgcttctccaccttggcccaggaaagaagaacctccacccggtcaggttcaccgtgcgtaccacgccagagtttgatccctttcccatcataatccacaaaaaagccgctgccgggaatggcgtcagaatgtccgccaacgccatacgtactccgcagaaatttaatattttcctgcttgccttcattcttttgaaactgttcaaaaatacggtatttgcgctgagatacgctgattccaccgcatagaacatagtcaatggccgcctggggcagcgtgaatacgggcttcttttccgcttcggcctgctcaataagggaaatctgctccgcttcgctgggcaggggccgttcctccgggtcgagccactggtccagcaggatcatcccgtagatggtgtcggcaacagagggccagcgcaggaagtcctctttctcgcgggagagatacaccccgcgccagaggttcagcacatcgtcccatgcccgatacccggcccgctggccattgctcaaaattttctctacataggtgttgtcgaagaagcccttaatgaaatcgccgcgctcttttctgccctcatgggcttcaaagaacgcggcgatctcggctttatggtcttttagggcgtcgctgacgcggagcaattctgttttctcgctgtcctcgtgatagtaggggatgtccgtgcgggcattaaaatcatggtggctgttttgaagtccggtagtaccggatgtcccatcaacaggggcctgcgggagtgcttccccggcaatcagtggatcacttacacgtccgtatagactagctccgtcagcgccatttcctccgccgctgcccggatgttgttcatcaggcccacccacttcatctgatcgctggccttcagctcctccgtcacgccctgctcccgcgctatccgcgccgtcag

SEQ ID NO: 363 - DNA, 965 bp, Flavonifractor plautii
  source 1..965: mol_type = genomic DNA
ttgatggcgcggatggcgcgggagcagggcgtgacggaggagctgaaggccagcgatcagatgaagtgggtgggcctgatgaacaacatccgggcagccgcggaggaagtggcgctgacagagctggtctacgcggacacataagcggcccgcttattgctggggaagaacttccacaggcccctgttgacgggacatccgctactgccggacttcaaaacagccaccatgattttgacgcccgcacggacatcccctactatcatgaggacagcgagaaacaggaattactccgcatcagcgacgccctaaaagaccataggaccgagatcgccgcgttctttgaagcccatgagggcagaaaagagcgcggcgatttcattaagggcttctttgacaacacctatgtggagaaaattttgagcaatggccagcgggccggatatcgggcatgggacgatgtgctgaacctctggcgcgggacgtacctctcccgcgagaaagaggaattccttcggtggccccatgttgccgacaccatctacgggatgatcctgctgcaccagtggctcgacccggatgagcgccccctgcccagcgaagcggaacaagtctctctcatagaacaggcagaagcagaaaaggcttcggcttttattttgccccaggaggccattgactatgttctgtgcggaaggtactcaccgtccaaactccgcatctatgaccagtatcagaagcaggaaagcagacaggaaaatgccaaattcctgaaagtggaatacggcgtaggctcctattccaacgctatccccagcagcggctttagggtagaccacgacagcacgggcatcaccatctcccgcgactacggcgaccctgacgggaaattcctgctgacctgggccaaggtggaaaagcgtattggggaactgattgccgctggacgctacctgaaccgggcg

SEQ ID NO: 364 - DNA, 965 bp, Flavonifractor plautii
  source 1..965: mol_type = genomic DNA
gtcgccggaccaatattccgcggcctgccggtacgcgaggtcttgggcggcgatggggtctttttttgcttggggacgatgggtataaagtgctgcttcggcctgctcaaaggtatcaaagccacccgccgttgcatacaccgtgttatcctgatcgtcatagcagtattggacataatactggccgttggggtactgccggatcaggatggtttcgccctccccataataccgggcgagggggttcacctggttcaactggcgggcgtactcctccgcctgccaccggctggtaaattcctcactgacgccctcatcatccacataaatctcatctcgaatgttgtcccacacagcgtagccgttctcagtttcgatgggggaaaagcgttcatcagactgtggcgcacgggcggaagcctgttccgcatcggccatgacccgctgaataaaggggtcggcattcagtttatccgggtcaatgacttttccgtccacaatgcctctttctgcaagagttctgcggatggcggcggggtctatctccgggaaagggtcatcctctgtctgctgcacttccgtctgctttttctgagtctgctgtttgttgtactcctcctccgcaaaggccaccatctcgtcaaaatccaggttggcgagaagttcattcaggtcatggaagccggcgcattggatggaagcagcctctgagccgtccaccagataggacaggcggaacgataccaagtccacactgatctctacggtgtgggcgctgtcgctggtggagctgaacgccagggggacatgagagaggtcggagaagtcggcctcctgctcaaagacctccatacagtaagcgttaatgagccattttgcccgccccaactgcgcctgcgccatgtcaatgacctggaagccctggggcggcgggtccagttcggcaaggaagtcctggggaatgg

SEQ ID NO: 365 - DNA, 839 bp, Flavonifractor plautii
  source 1..839: mol_type = genomic DNA
atcgccggaccaatattccgcggcctgccggtacgcgaggtcttgggcggcgatggggtctttttttgcttggggccgatgggtataaagtgctgcttcggcctgctcaaaggtatcaaagccactcgccgttgcatacaccgtgttatcctgatcgtcatagcagtattggacataatactggccgttggggtactgccggatcaggatggtttcgccctccccataataccgggcgcagagctccacctggttcaactgacgggcgtattcctccgcctgccaccggctggtaaattcctcgctgacgccctcatcgtccacatagatacggtcgttctggccatcccacacgccataggcgatttgggagccgcggtccagctccacagcatagaagcggacatccggctccgcgccggccttctcctcttgactgggcgctgtgtccgcggggtgttcccgtccctggcgctgtttgttgtactcctcctccgcaaaggccaccatctcgtcaaaatccaggttggcgagaaattcattcaggtcacggaaaccggcgcattgaatggaagcagcctccgcgccgtccaccaggtaggacaggcggaaggataccaggtcggcgctgatctccacggtatgggcgctgtcgctggtggagctgaacgccagggggacatgagagaggtcggagaagtcggcctcctgctcaaagacctccatacagtaagcgttaatgagccattttgcccgccccagctgcgcctgcgccatgtcaatgacctggaagccctggggcggcgggtccagttcggcaaggaagtcctggggaatgt

SEQ ID NO: 366 - DNA, 796 bp, Flavonifractor plautii
  source 1..796: mol_type = genomic DNA
gcgaaacggtttcgcgttcgctgttgtacaaaacaaggagctctcccggccgaaaccagaagagcttgttggtgcagtaggtcagggctggatagcatccggcgaaacagtttcgcctgcctcctccagggcgttgatgatgtacaggatatccttgccatcgggaacgaccgcattgacagctgcgccgctgttactacccggcaccttgggcgtggagctgtggatggacggtttgctgctggatgggatactgctgccggagccaacgctgttgaggatagagccggagctgcgggcaatattcatgccgccattgatcaggatcttgttggcggagaggatgtcggcggcggagaggatggagaaagacgacttgccgccaaccagcttctgagccagggcgccggagtctgtctgcagggctgcggcctcggctgccgacgggccggagacgactgatttgggcgtaggctggctggggatgttgttatggctccgggacaggtttaggtagtcccggccgtcggtgataacgccagagaaggcggtgatgtccaggtcgtcctcatcccgctctttgacctcgatggagggccggggcgatacggcaggagcggcggctgtggccatcattgggccgactccggcggcaatggtgctgagcagaagagccgaagccagcagggctggtacttttcgcatggagaaattcctcctttcgtgttcgaattataatatgcgcgttacccagaatttattgcccaaacctaaaatgcacgcgaaaccgtttcgc

SEQ ID NO: 367 - DNA, 747 bp, Flavonifractor plautii
  source 1..747: mol_type = genomic DNA
agggtttccggggtgtcaaagtcatagacatgggcgaaatcctcgccgctgaaatagtccatggggtcgatgccgcaccgggtcagcatgataaaagccacgctgctctccaccaggcccttaaaccatgcttcggtactgaggtcatccagttcttctagcaggctgccctctttgatgccccgcagctccgtgaggtagtcgccaaagttgtcctccacgatgaccttcgccgtttccagaaggcaggcggcaagaccagagcggtccgggaactcgccatagctgttctccagcgcctcgatcaccgcgtcctcataccgcggctccatcttccagatggggatggtgcgcccctggcggctgttggtatcagacatatcaaagacataccgcagcttatagccccggtctgtatccaccagcagggcgatccccctggtgccctggttgacatagcggccatgcttgttccagaagtcgatctgggcgcaggcggtggcgtccggcttctgcgcgtagatcaaaagctggtcacggaaattgtacttgaagttgtgggcggcggtggtcaggaacgccatatagttcccgctgttggcggaaatttcgcgggtcttttgcgctgcaagctctacaatagagtccagttttttcgccacgctctatccctccgtttcctcataagattgcagcaggccctttgctgccgcggcgattttagagatgcgcccggtgagctgggcg

SEQ ID NO: 368 - DNA, 727 bp, Flavonifractor plautii
  source 1..727: mol_type = genomic DNA
cttgataagatagtccagggccgttttcccgccgattttgcgggagaaccagttccattttccgttgctgatcttcaagctgtcatgctcacgggtgcagtaggtgcttccgcccacatggacgagctggtgcgggtcataccgctggagataggtcagcaggtcccattccttagcctgagcgatctgctccggggtgacatagcccatcctaccgttcctcccgctggcccttttccttttcagcctgtatgatggcgttggcgcgggcctcgatcacatcccgtacatcgtccatgtggtgggtttccgcccgttcccacgcccggtaaacatccgccagcggggtccgggaccgcagcagagccgcggcctgggcgtccgtcagttccagtacctccatctccatcacaatatcctctcggaccgtgaatttgcaggcattgtccaggatcacattggggggctgctccagaagccactccttatacttctgctgctcggcggtcatccgttcataaagttggcgcatcatttctttgttggtcatgctgtatcactccttataaaatagtgatagccgggagatctccagatgaaaatctcccggctatgtaaaacggcaaggccgcagacacggccttgccaaaaaggtatgtgattgctttatcgggcgtcccggtctttcccggctttgtgtttcactggcagaggcccatctttcgct

SEQ ID NO: 369 - DNA, 727 bp, Flavonifractor plautii
  source 1..727: mol_type = genomic DNA
ggcgaaagatggacctctgccagcaaaacacaaagccgggaaagaccgggacgtccgataaagcaatcacatacctttttggcaaggccgtgtctgcggccttgccgttttacatagccgggaggttttcatctggagatctcccggctatcactattttataaggagtgatacagcatgaccaacgaagaaatgatgcgccaactttatgaacggatggcagccgagcagcagaagtataaggcgtggcttctggagcagccccccaatgtgatcctggacaatgcctgcaaatacacggtccgagaggatattgtgatggagatggaggtgctgaaactgacggacgctcaggccgcggccctgctgcggtcccggaccccgctggcggatgtttaccgggcgtgggagcaggcggaaactcaccacatggacgatgtgcgggatgtgatcgaggcccgcgcagatactgtcatacaggctgaaaaggaaaagggccagcgggaggaacggtaggatgggctatgtcaccccggagcagatcgctcaggctaaggaatgggacctgctgacctacctccagcggtatgacccgcaccagctcgtccatgtgggcggaagtacctactgcactcgtgagcatgacagcttgaagatcagcaacggaaaatggaactggttctcccgcaaaatcggcgggaaaacagccctggactatctcattaaa

SEQ ID NO: 370 - DNA, 644 bp, Flavonifractor plautii
  source 1..644: mol_type = genomic DNA
gcggtggccctgacctctgatcgtcgcgccacgtagaagtagcctgcatcggcgctgcaaatggggtggccgtcacagcgcaggcggttgaccgcccgccgcagctccgtcccgccgacatgaaacgcggcctccagctccttgctggaagctgcgttctcctgtcccttgtggtatttcttcgggtacgcgcacagggcctcatcaatggatacgcccttcatcgggcctcgcctctgtcctggcggcgggactggatgggccggccacgcttattgtatcggctcgggtcggcggcagaggatgtccagcccagggtcgccccggccagcattgccgccgcctgcgccctggtcacgcccatatcgccgttgagtacatccgccgtctgctggggcgttttccctttgaaataggccatgggggacacctgataccccggcttgtaccgctctatggcgatcagctcacccgatgacggctggacggtaaagcacttctccggcaggggcggcgtcagagggatcacctcgttgtggcaccgctccatctgctcggcaaactggcagatgtgaaacaggctgtcccagccgttgcccacctccacatggcagtcatcaatatagcggcaggtccggtcaata

SEQ ID NO: 371 - DNA, 569 bp, Flavonifractor plautii
  source 1..569: mol_type = genomic DNA
agaatttcagctataccatcgtggacggtgaggtgtactatcgggaaaacagccgcatgaacccggtagaggtgtccgtaacagcggccaaccgcatcaaggggctgatcggcatacgggactgtgtgcggacactcattgagtaccagaccgaggactggcccgaccaggacattcaggcccagcagcggaagttgaacgctttttacgacgcctttgtggacaagtacgggcggatcaactcccgcgccaacagttccgtgttcagcatggacagcgcctacttcctcctgacttcgctggaggtgctggacgatgagcgcaactttgtccgcaaggcggatatgtttaccaagcgcaccatcaagcagagggtcacgatcacccatgtagataccgcgtccgaggccctggccgtgtcactggctgaaaaggcaaaggtggacatggactatatggcggagctgaccggcaagaccgagcaggaggtctacgacgacctgaccggcgtgatcttcctgaaccccatgcacgggtatggcggtggctccgaggaaaagtacctcacc

SEQ ID NO: 372 - DNA, 569 bp, Flavonifractor plautii
  source 1..569: mol_type = genomic DNA
agtgaggtacttttcctcggagccaccgccatacccgtgcatggggttcaggaaaatcacgccggtcaggtcggcgtagacctcctgctcggtcttgccggtcagctccgccatatagtccatgtccacctttgccttttcagccagtgacacggccagggcctcggacgcggtatctacatgggtgatcgtgatcctctgcttgatggtgcgcttgataaacatatccgccttgcggacaaagttgcgctcatcgtccagcacctccagggaggtcaggaggaagtaggcgctgtccatgctgaacacggagctgttggcgcgggagttgatccgcccgtacttgtccacaaaggcgtcgtaaagagcgttcaacttccgctgctgggcctgaatgtcctggtcgggccagtcctcggtttggtactcaatgagcgtccgcacacagtcccgtatgccgatcagccccttgatgcggttggccgctgtcacggacacctctatcgggttcatgcggctgttttcccggtagtacaccttgccgtccacgatggtatagctgaaattcc

SEQ ID NO: 373 - DNA, 559 bp, Flavonifractor plautii
  source 1..559: mol_type = genomic DNA
accctacaggtcaaaagtacaaaatgtctatatacaggaagacacgctcacaggcggatatcggtacagcaggggagtggagcatctgcatatagcagaatagccctatatatacggacaccattggacatagaagatggggagcatctacaaaggcgcgcatcagaatagcgatactgcctatatatcccacttccaagcgaacgcgccagttctgcacgcccgccccctcaaaaaaaacaatacccatataatatgcagataatacctaatttcattcagtctaatattcaaataataatcacataataagcaataatatccaaatcatatgcgcaatatgtaaataatacctacataatatgcgaaaagaaactcccggccgctaagttggatgaggccgagaaaagcagggccagggtgctaccttctgattctgctttgctgcgaccgctggtcccttcagttgtactgtactcccaaccgtgcaaaagacagtcccctttcccagcgactattatataccaggctgctggagatccgtgtctcggcgagaagc

SEQ ID NO: 374 - DNA, 515 bp, Flavonifractor plautii
  source 1..515: mol_type = genomic DNA
gggtctttccatatccagtcctggaacgcttgcttgataagctgctgcttgccctgggcgatagccgtttccttcttgttcaggatgggaacgcggttgccgtgttcgtcctccacatagtcaaaaatacgcaaatcccggagattcagggtttcctcaatgattttgtagccattgacacgggtggtgccgtaggtgttctccgccttgacattgcccctgtcggcaaatttactttcgatattccatgcgccggtgtgctgggagtaatggctgcgtatcatccgctgactgcggggggaagtcccgaacagttcatagataaattggtcaatgacctctgtgggcagccaggtggcccccagccggacggcgatctcgctggcggtcaggtccaccggctgcacccgttccaaagcctggacatgggcggtgtagtcctccgggtacagttcggcgcttcgttttgcccattccagcttctcccgcacattcccggagaggtattcgtccgc

SEQ ID NO: 375 - DNA, 488 bp, Flavonifractor plautii
  source 1..488: mol_type = genomic DNA
gccccagcgccgccaccatctccttctgctgttccgagggttttagcacgatgttgtggtagttggccttggggacggggaggttgagcatatccgccgtctggatgtccgccacttctttgaacatagacatgagttccgggaggttgtagaaccgggagaaccgggtcttggcccggtagccggtgccctccggggccagttcaatagcggtgacggtttccccgaaggtagacgcccaggcgtcaaaattgagcaggccgtgttcttccagggtgtggtactgcaaatacttttgcatggtatacatctccaccatggtgttggagatgggggtgcctgtggcgaacacaacgccccggcccccggtcagctcgtccagatagcggcatttcatatagaggtcgctggacttctgggcctccgtctggctgatgccgcccacattccgcattttggaaaaggcggcgaggtttttgtaatagtgg

SEQ ID NO: 376 - DNA, 488 bp, Flavonifractor plautii
  source 1..488: mol_type = genomic DNA
ctcccagcgccgccaccatctcctcttgctgttccgagggtttcaggacgatgttgtggtagttggccttggggacagggaggttgagcatatccgctgtctggatgtccgccacttctttgaacatagacatgagttctgggaggttgtagaaccgggagaaccgggtcttggcccggtagccggtgccctccggggccagctcgatggcggtgacagtctcgccaaaggtagacgcccaggcgtcaaaattgagcaggccgtgttcttccagggtgtggtactgcaaatacttctgcatggtatacatctccaccatggtgttggagatgggggtgcctgtggcgaacacaacgccccggcccccggtcagctcgtccagatagcggcatttcatatagaggtcgctggacttctgtgcctccgtctggctgatgccgcccacattccgcattttggaaaaggcggcgaggtttttgtagtagtgt

SEQ ID NO: 377 - DNA, 410 bp, Flavonifractor plautii
  source 1..410: mol_type = genomic DNA
tataggatgggatgcgctggggcctggcttcatggttgccgtggatactgaagaatttgaccggaatggcgctggcatactcttttgcgcgggtgtcgcggtcattcaggtaataattgaaaccagcatcaccaaggatgattatggtatcggattttgttgtttccattgcgcggcaaaaggtgtccacgcggagaaagttcccatgtgtgtcacctgtgagataggttgccatagcattcaactccattctatcatgaattttgataccgtatacaggtgggcgtgggacacccatccgcggaaatgatacaacaaactatgtacgggggcaagtctgcggcttgctcccgtatcatgtttttgagggtcagacatttctcactctttcagcgttcgcggtcgggact

SEQ ID NO: 378 - DNA, 378 bp, Flavonifractor plautii
  source 1..378: mol_type = genomic DNA
tctttcaccggctccattcctccttcctctttgcctgccccaacctccgctggagcagcagatcgtttacatccttgccgctgggcggcggcctgtccagcacttcgtatctgtcccccaggccagccatgatacccgctgccgcgtcccggcccacctcgtcattgtccaggtggaggcagagcgtgtggacgccggggtggtcctgaaggtactggctgagagccatggggatgacaaactcttgtttctgcttgaacaccccgcccagggagagcatggcgtcctgccgccagtcccggcccttcattttcagcagggtggcgtagctcaacaggtcgatggccgattcaaacaggtggacgctgggtgcagcgg

SEQ ID NO: 379 - DNA, 338 bp, Flavonifractor plautii
  source 1..338: mol_type = genomic DNA
caggccattgcctttatgaacgaggcaggccgagagatcaacgccatcgcccgtgacttcaacagcggttacgggacggcagaacagctcaaatatgctgtccggcggctgagtcaggtgtatcagcgcctgcatgagctgagaaagaagggatgtccccaggcggatgacgagatcatgcggtctgtcctcaccaataagggcgaccgcgaccatcgaatttatgagataccgacctccgcgattacgctggaaggaaagaaaatccggtatttcgattttatttcctcgctgcgggatgaagggtgcaaccgcgctttgcggcgaatcgtcccccg

SEQ ID NO: 380 - DNA, 338 bp, Flavonifractor plautii
  source 1..338: mol_type = genomic DNA
tgggggacgattcgccgcaaagcgcggttgcacccttcatcccgcagcgaggaaataaaatcgaaataccggattttctttccttccagcgtaatcgcagaggtcggtatctcataaattcgatggtcacggtcgtccttattggtgaggacagaccgcatgatctcgtcatccgcctggggacatcccttctttctcagctcatgcaggcgctgatacacctgactcagccgccggacagcatattggagctgttctgccgtcccgtaaccgctgttgaagtcacgggcgatggcgttgatctctcggcctgcctcgttcataaaggcaatggcctc

SEQ ID NO: 381 - DNA, 326 bp, Flavonifractor plautii
  source 1..326: mol_type = genomic DNA
tatctttccgatatggaccggctgaaggagaacacccaccccaatgaggacggcttctcccccatggaggtggaggggaccgtctacaccgacaaaaaagccgcaggcagcgccatcctcgccgcctgcaaagccatgaccagccccgaacctgtccccctgggccagtaccggggcttttctatggacctgtcctttgcaagcctgaccagggagttcaaggtcacgctgaaaggggcgctgtactacaccacgaacctcggcacagatgtttttggcaacattctccgcctggacaatctgctggaaagcatggaggagcggat

SEQ ID NO: 382 - DNA, 317 bp, Flavonifractor plautii
  source 1..317: mol_type = genomic DNA
agcccgttggcgtcggtgttcaggtgtacccaatccggttcctcgctggagagggcgtcccgcttctgcaaaaagaggatgtcgctggtcacatccgttcccgcggcgtccttgaaagtgttgttgggcaggcggatggcccccagcaggtcggcgcgctgggcaaggtacttccgcacagtgggggtgtccttgtccatcgtgcccttgctggtgacaaaggcgatgacaccgcccggcctgaccttatccagcgtccgggcaaagaagtagtcgtgaatgaggaaattgtatcggtcataccgcttgtcgatcac

SEQ ID NO: 383 - DNA, 306 bp, Flavonifractor plautii
  source 1..306: mol_type = genomic DNA
gctggaactacctgccgcaaaagaaggaactgaaccgaaaccgccggcagcgcctatgcccacgcaagaaggcacagagaaggcagcggagtatctgttcgatcaggagcgtattgttgtctttcaatcccccagcggcaagttttataaccattatggctacgatgtgcagagtgggttttccaatgtaatagcgggcggttttgatacctttgaagaagctgaaaaggcattgtactcccatcggcccaaagctgaaagggttttgaaaccggctgaaagggaaaatacagtgggaacggctga

SEQ ID NO: 384 - DNA, 304 bp, Flavonifractor plautii
  source 1..304: mol_type = genomic DNA
agcgggcggagaaggtccgcaataggatggtggacagcaccgaggacaatatgctgcttatcaccaacgacgggcgcaagctggccctggaccaacggctcctcaaccccttgctcccggacagcgacaccagcaagatcaacgcctgtgctggggatgtgtttgatatatggcagcgcacagcggaccaacgttccgcgcagatggtattctgcgacctctccacccctggcaagaaccggcccattgaaatggtcccaaacgagcagggcggctacgagatggcggaatttcagaatgtcta

SEQ ID NO: 385 - DNA, 295 bp, Flavonifractor plautii
  source 1..295: mol_type = genomic DNA
aggcgaggaatttgtcttcgccagagactctcgccggagccggtccctgccgggaccgaattcgggtccgtgaggactccgcggagcaaatcgtttttctctacgatggagaatcggacatggcatgtccggtcgggcggcagacattgcaggcgatgcgagccgctcgcgctggaagatgatgcggcttccccctctaagttcgatgagaacggctatctcacggacccggcatcggttccggaacggaaccggcccgtgccactgcttccggcaaagaaattcgccccatcag

SEQ ID NO: 386 - DNA, 275 bp, Flavonifractor plautii
  source 1..275: mol_type = genomic DNA
gcccccaggtacaccgtgacacccagggttaagcggtattccttttttggagggggcggcggattcagctcctcctcggtgggttccagcggtgtggcaaggggaccgctcagatcagccagcacagcctcacagcgttccgtcaggtgggtcttgtcccggatgatcgtctgcatggcgtttcgcagggtaggcaggacaaagagattatctcctgacagaacatagcacttcttttcccctattctaaaggagttcgcacacgttctggcaag

SEQ ID NO: 387 - DNA, 264 bp, Flavonifractor plautii
  source 1..264: mol_type = genomic DNA
cccggtcccgctgtcttttcagccggtcccatcagacgccgaatgacggaaatatgctccacgcgctcgatggggaaaccaactgcgccctcaaaggtgagatcccgcagggaggcccggccatcctcgtcgatcttttctacacgaaaccgccggccctccagcgtgatctccttaccgagcaggtcacggtccgaagcagccgtttccgtatcctcccgcggaggcggaggttgttcctcttttgcggcgggaggttccggt

SEQ ID NO: 388 - DNA, 245 bp, Flavonifractor plautii
  source 1..245: mol_type = genomic DNA
acccaggtgaggggcaatcccactgcaagatataccgtggcgtctgtcaggccatatacattcagctcacgggcgatagcggccagggtgaggatatagtagtcatcgtccccggtcttgtccgccttaaactccttgtggcctgtcccaatcaggtagtagcgtccgtcatagaccagcagatcgtctttgaataccggctctgcgtcatgaacggtcagccccgcgggaaaacagcagtttgc

SEQ ID NO: 389 - DNA, 242 bp, Flavonifractor plautii
  source 1..242: mol_type = genomic DNA
gaccttcggggcctccggcgcttccagattgggcagacggtagtcgccctctgttcgatatgtcagttccatgttcaatgctcctttcctgttttgtcctgctatcatgatacggcctgtttggagtttgcgcaaatgtgcgattttccctttgctctgcccggtacatgctcaaaaccgtgctggcgatctcccgcaggggcatttccgcaatatcgctcaccgcgccgcccaggatggac

SEQ ID NO: 390 - DNA, 242 bp, Flavonifractor plautii
  source 1..242: mol_type = genomic DNA
taccttcggggcctccggcgcttccagattgggcaggcggtagtcgccctccgtccggtatgtcagttccatgttcaacgctcctttcctgttttgtcctgccatcatgatactgcctgtttggagtttgcgcaaatgtgcgattttccctttgctccgcccggtacaggctcaaaaccgtgctggcgatctcccgcaggggcatttccgcaatatcgctcaccgcgccgcccaagatggag

SEQ ID NO: 391 - DNA, 241 bp, Flavonifractor plautii
  source 1..241: mol_type = genomic DNA
ggcccggagggagcggctgacgcggctctacaacgacaaattcaacagcatacggccccgtgagtacgatggaagtcatctgaaatttgtaggcatcaacccggagatcaccctgcggccccatcaggtgaacgccatcgcccacatcctctacggagggaacaccctgctggcccatgtggtgggggcagggaaaacatttgaaatggtagctgccgcccaggagagcaagcggctgggg

SEQ ID NO: 392 - DNA, 241 bp, Flavonifractor plautii
  source 1..241: mol_type = genomic DNA
tcccagccgcttgctctcctgggcggcagctaccatttcaaatgttttccctgctcccaccacatgggccagcagggtgttccctccgtagaggatgtgggcgatggcgttcacctgatggggccgcagggtgatttccgggttgatgcctacaaatttcagatgacttccatcgtactcacggggccgtatgctgttgaatttgtcgttgtagagccgcgtcagccgctccctccgggct

SEQ ID NO: 393 - DNA, 229 bp, Flavonifractor plautii
  source 1..229: mol_type = genomic DNA
gtacctccgggtccgcggggatggacttgtcctcgccctcggtttccggatcgtccatgacatactcggtgatggagccttggatactctgaatagcaacggcaagctggtcctccaggtcccgcccctcaatgggcaggcaggcggtttccggcccataggggccgctgatctcccgcatttcgcccatgaccatctccgagtggtcaataaaatactggttcatttt

SEQ ID NO: 394 - DNA, 222 bp, Flavonifractor plautii
  source 1..222: mol_type = genomic DNA
cgatgacctgcggaataagctgattgccagagggataccagccgaagaaatagcctacattcacagcgccaacacggagacacagaaaaaggaactgtttggcaaagtgcgctccgggcaggtccgggtgctgatcggctccacccagaagatgggcgcgggcaccaatgtccagaagaaactcgtggcgctccatcatctggactgtccctggcggcctag

SEQ ID NO: 395 - DNA, 222 bp, Flavonifractor plautii
  source 1..222: mol_type = genomic DNA
gagggccgccaggggcagtccaggtggtggagcgccacaagtttcttctggacattggtacccgcccccatcttctgggtggagccgatcagcacccggacctgcccggagcgcaccttgccgaacagctcctttttctgcgcctccgtgttggcggtgtggatataggctatttcttcggctggtatgcccctggcaatcagcttattccgcaggtcatca

SEQ ID NO: 396 - DNA, 212 bp, Flavonifractor plautii
  source 1..212: mol_type = genomic DNA
gtccagggcttttcctttaccgaggcagtggaggccctgacgggaccgaacttctctcccccgtctccggcgcctcaagccaggccgaaggagcaggaaccccggaagctggtccttccccaagccagccggtgcgccacccatgttgtcagctatcttcatgggcggggcattgactatgatatgatcgactactgcatccagaccgggcg

SEQ ID NO: 397 - DNA, 211 bp, Flavonifractor plautii
  source 1..211: mol_type = genomic DNA
gggtggagatcgccggggtggatgtgtttccccagggcttcgcggcggtggccggccagatcagggacttccagggcgtgaatatgctctgtgacattggcaacggcaccatgaacatcatgttcatcaacgaccgcaagcctgttgtggaccggatgtttactgagaagtatggcacccatcaatgtatgctggccgtccgggagaatgt

SEQ ID NO: 398 - DNA, 208 bp, Flavonifractor plautii
  source 1..208: mol_type = genomic DNA
gagcatcttgtgatcttccgggaaccgaacgggaccttctgcaatcagtacggcttcatttccggcagggtgacgcccacgaccgggagctttgccaaactggaggaggcggagaaacaactttatgcggaccgccctctggcccaaaaggtccaggcacgggagaagccgcccgcccatgccccggcggaccgggacgaagcggagc

SEQ ID NO: 399 - DNA, 208 bp, Flavonifractor plautii
  source 1..208: mol_type = genomic DNA
cagcacctgccgggaacagttggaaaataccaggatgcagctcgaaaacgccaaactggaggtggataagccctttccccaggaggacgagctgaaaagaaagtccgcccgcctggatgaattgaacatcctgctgaacatggacaagcgggagagcgagatcgtggatggagatgtaggggatgaagtcaccgcccccgcccgtggt

SEQ ID NO: 400 - DNA, 208 bp, Flavonifractor plautii
  source 1..208: mol_type = genomic DNA
gcaacgagcgggggcggtgacttcatcccctacatctccatccacgatctcgctctcccgcttgtccatgttcagcaggatgttcaattcatccaggcgagcggactttcttttcagctcgtcctcctggggaaagggcttatccacctccagtttggcgttttcgagctgcatcctggtattttccaactgttcccggcaggtgttt

SEQ ID NO: 401 - DNA, 206 bp, Flavonifractor plautii
  source 1..206: mol_type = genomic DNA
cggcatattcctcctcggtgagcagggctttcagctcggcgtacttgctgtggcgctcgtcaaagcagtctgccaaaccgccccagcccacataccgcgccaatacctcctgttcctctggggtggcaagccggtcctcggcctccagccttttcagcaggcggatggcccggacattgttgttgaaccgctccccaggggttccc

SEQ ID NO: 402 - DNA, 204 bp, Flavonifractor plautii
  source 1..204: mol_type = genomic DNA
tatgacagggcggtttcatctatatcctcgcaggaccggaccggggatttgctggtcatgatctgcccgatgaacttctgcttgccctccaccagctgatagaggtagctgtcaaaggtgttctcggtaacataggtatagatgtccacctcattgttctcgttgccctgccggatgatccggccctcccgttgctgaaggtcg

SEQ ID NO: 403 - DNA, 192 bp, Flavonifractor plautii
  source 1..192: mol_type = genomic DNA
gaagtcgatccgtcccacgggcagcggggcgtccggcgattccccggcatccggttcttcggcgtcagccacgggtgccgcgttctccgccacctgaagcagtctgtcgttcagcgggttctccgccagcagacggtcgaattcctcacggggcagctccttattgaaaataggaaaggtcgggtcatagag

SEQ ID NO: 404 - DNA, 184 bp, Flavonifractor plautii
  source 1..184: mol_type = genomic DNA
gccctcaatagactgctcatacttggcaatctgctgaggcagcgtcttaatgatctgatcctccagagcgtaccgctggctgaggtggttggctttcaggagccggagacgctgcacatcaatgtccaggtccatcttctccttgatgtggggattgccggtgcagagcgccttgatttccgcg

SEQ ID NO: 405 - DNA, 184 bp, Flavonifractor plautii
  source 1..184: mol_type = genomic DNA
tgcggaaatcaaggcgctctgcaccggaaatccccatatcaaggagaagatggacctggacattgatgtgcagcggctccggctcctgaaagccaaccaccttagccagcggtacgctctggaggatcagatcatcaaggagctgccccagcagatcgccaagtatgaacagtatatcgagggt

SEQ ID NO: 406 - DNA, 167 bp, Flavonifractor plautii
  source 1..167: mol_type = genomic DNA
tcatagtcgccggtggcgatcctgccgcagaaccgcttgcggttcttggtttcaaagtccttcctggtcgccaccagaatattggcagaggggtagagctgcaaatactccgacgcccactgctccgtcaggtggttgggcaccacgaacaggcttttttggcacag

SEQ ID NO: 407 - DNA, 164 bp, Flavonifractor plautii
  source 1..164: mol_type = genomic DNA
cggccagggagtccaccctgacggccttttacaccccgcccgtggtcatccgatctatctatcaggcgctcacgaatatgggcttccagaccggaaatctgctggagccgtcctgcggcatcggcaacttcatcggtatgcgcccggaggccctggcggactcc

SEQ ID NO: 408 - DNA, 164 bp, Flavonifractor plautii
  source 1..164: mol_type = genomic DNA
agagtccgccagggcctccgggcgcataccgatgaagttgccgatgccgcaggacggctccagcagatttccggtctggaagcccatgttcgtgagggcctgatagatggagcggatgaccacgggcggagtatagaaggccgtcagggtggactccctggcta

SEQ ID NO: 409 - DNA, 158 bp, Flavonifractor plautii
  source 1..158: mol_type = genomic DNA
ctgaaagccaaccacggggaacgcttctccatcaagcagatggagcgcacaaaaaagtccattgacgccaagttagcaaagttgaacgaccagagccgtaaggatgatgtggtcacatttgaagaactgggcattgaccgcctctttgtcgatgaagc

SEQ ID NO: 410 - DNA, 155 bp, Flavonifractor plautii
  source 1..155: mol_type = genomic DNA
aaaatctacggcgtggagttggacggcatctcaggccgcatcgcccagcaactctatcaacaatcgtctatcgctgtccaggggtttgaaaaaacagacctcccggacagcttttttgacgccgccatcgggaatgtgcccttcggctccttcaa

SEQ ID NO: 411 - DNA, 155 bp, Flavonifractor plautii
  source 1..155: mol_type = genomic DNA
cttgtatgaaagtctgccctatcacaacgccgtattcgtgggccgggaccggcagggccagccccgttacgccgccctgcggggtatcataggggacttcaagggcgaggcccccggcagcgacaagcggtattcctttgccatcgcggaggacc

SEQ ID NO: 412 - DNA, 155 bp, Flavonifractor plautii
  source 1..155: mol_type = genomic DNA
tttgtatgaaagtctgccctatcacaatgctgtattcgtgggccgggaccggcagggccaaccccgctacgccgccctgcggggcatcataggggacttcaagggcgaggccaccggcagtgacaagcggtattccttcgccatcgcggaggact

SEQ ID NO: 413 - DNA, 146 bp, Flavonifractor plautii
  source 1..146: mol_type = genomic DNA
aggagttccttgtatgggtccgtttcaccggtccgtgttttgaaatccacataatcatcaatgatggagcaaatctccgctgcgatgtcccaacgggccttccgctgctctacctgtgcccggtattgcggataatgctctttttc

SEQ ID NO: 414 - DNA, 146 bp, Flavonifractor plautii
  source 1..146: mol_type = genomic DNA
gtcagtatccggctcacgccctgctccttcgtcgacgcaaagtccgcttcgctcggaactcccgcaggcggaaattcctcgcccgctcccttgcgtctcctctccccggcgaacccgtttcactgggcttcgccggggtctgctca

SEQ ID NO: 415 - DNA, 143 bp, Flavonifractor plautii
  source 1..143: mol_type = genomic DNA
ggtactcatgccggtctgcgttgggaacttcaggatggaggacaaagggggaaaccctggccctgcgctggggctggggtggggccagagttggctccttaccgccctggtcgtgcccatctgctgaactttccgcgcccttt

SEQ ID NO: 416 - DNA, 137 bp, Flavonifractor plautii
  source 1..137: mol_type = genomic DNA
gtggggaagtccccgatcacgcggagccacttcttctccagcaggtcgtagacagccgcgccctcgtaggcaaagccgtctggttccatcgtgccttccagatagccccgtgccgcctgttccgcttcctccggcgt

SEQ ID NO: 417 - DNA, 135 bp, Flavonifractor plautii
  source 1..135: mol_type = genomic DNA
tgctctaatttttccagagcgaaatccagtatcttcgccttccgctccgccagcatggtcagataaaattgccgctgcaaatcactgaggaatggggtgtcataaatcaacttcccgattttatccatgtcgatc

SEQ ID NO: 418 - DNA, 135 bp, Flavonifractor plautii
  source 1..135: mol_type = genomic DNA
ggaaaatatgggatgctgcggcgcagttaccttcagacccacaggaacgcctactacacggggatgctcctcagcggcaggctgaacgcccatctggagaagatcgaccggcaggccacggagatggtggagcag

SEQ ID NO: 419 - DNA, 132 bp, Flavonifractor plautii
  source 1..132: mol_type = genomic DNA
tgggcacgaacggcagcgtgggcgaaagcgtggagtacaccggcgcggaggaatttgtggcggcaatcaaggaagaaaaccatgctggcgcgcccatgcggatcgtcctctaccgggacggccagggccaga

SEQ ID NO: 420 - DNA, 130 bp, Flavonifractor plautii
  source 1..130: mol_type = genomic DNA
ggcgcacagccctcccggagaatacggatctgcccgccgtccgggatgcggaacagctccttgtagtgcgggtcgatgaaccggatgcccttttcagcctgttccatgtgccggtccagccagtcgcggc

SEQ ID NO: 421 - DNA, 130 bp, Flavonifractor plautii
  source 1..130: mol_type = genomic DNA
gggtccgtgagattccgtcgttttgcgctacgacccacatatggtttctgtgaaaacctataactatctctgccgcagcggccgcagaagcaggtctcacggacccaacataaggcaccggaacggagcc

SEQ ID NO: 422 - DNA, 126 bp, Flavonifractor plautii
  source 1..126: mol_type = genomic DNA
atgccacgggatttttttcttgccggaggctgtggcacgggccggttctcttgcgggaaccgatgttgggtctgtgaggtttcctggcgtataggactccattgtttgtgccaacaatttgcttgc

SEQ ID NO: 423 - DNA, 109 bp, Flavonifractor plautii
  source 1..109: mol_type = genomic DNA
ttccgcgatgccgttcaggacctcactccgctgctgttccaggagataccgctggcgctccacactcaccgggattttctcaaactggctgtgtccgataatgatggca

SEQ ID NO: 424 - DNA, 109 bp, Flavonifractor plautii
  source 1..109: mol_type = genomic DNA
cgccatcatcatcggacacagccagtttgagaaaatcccggtgagtgtggagcgccagcggtatctcctggaacagcagcggagtgaggtcctgaacggcatcgcggag

SEQ ID NO: 425 - DNA, 103 bp, Flavonifractor plautii
  source 1..103: mol_type = genomic DNA
taccctgcggcacaggtgcggcctgcccctgctgggtgttgccgtccgccgcgtccggcgtcatttgatgtgcaattccttctccacgtcgttcaggttgatg

SEQ ID NO: 426 - DNA, 2987147 bp, Extibacter hylemonae (residues 1-1,493,574 of 2,987,147)
  source 1..2987147: mol_type = genomic DNA
gtgtttgccaccggcgcggacgacgcgcccacgggcagcagcacacagacggaaacatccgaaggggccccttcggatgtcgggagcggagctcccgacataataacctctgaacagcagaagggcgaggcgcagaccggcgcgcagtttgaccaaagcggaacggtggacctgaacaggtacgattcttttgaggaggctgcctctgcccagatcagtgagccgcacacccaatataccaccctgaaaatcacagggaaaaccaatggagatacatggacgaccgacgacgggaactatttccgaacaaacttctcgagcgtgaccgaactggatttggggaactttaccggtacgtttgggaagagggcgtttgaaaaaagcagtatagagaaagtgcgcctgcccgctgatgtggcgattcctatctatatgttctcaggctgcgaaagcctagccacgctgtctgtgggaagcaacttacccgcctccggagtgatcgacctgaccggctttaccgcagcctacagcgatagggccttccagaactgtacttccatcaaagaggtaaagctgcccgctgatgtgccgattgctgacgctatgttctcaagctgtgaaagcctagccacgctgtccgtggcaggcaatataaacgcacagggaggagtgatcgacctgaccggctttaccgcaatctacagcggtactaggaccttcatggactgtacttccatcaaagaggtaaagctgcccgctgatgtgccgattcttgactatatgttctcaggctgcgaaagccttgctacgctgtctgtaggaagcaactcatctacacccaacgtgatcgacttgaccggttttaccgcggcctgcggcattgatgccttcgacggctgtacttccatcaaagaggtaaagctgcctgctgatgtggcgatttccacctctatgttctttcgctgcgaaaagctagccacgctgtctgtggcgggcaatataaacgcacagggaggagtgatcgatctgaccggctttaccgcagcctacggctataatgccttcgcgggctgtacttccatcaaagaggtaaagctgcccgctgacgtggcaattgctgacggtatgttcgctgcctgcaaaaacctggccacgctgtctgtggcaggcaatataaacgcacaggaaggagtgatcgacctgaccggctttaccgcagcctacggctggaaggccttcgcgggctgcacttccatcaaagaggccaggctgcccgactcggccatttcacaggaagtgtttagcggctgcatcaatcttgatgtgctgatgttttacggcgccggcgcccccagcgtgggagattttgctttctctggcgtatccgacggcggcacgctgtattacccgcagggcggaatggactataccaaaggaaccttcggcgcgccgggtttggcaaattgggattttattgaagcctttggcccggagattgtagcccagccgtccgctcaaacagggacagtgggacaaaccgcggctttccagtttgcggtgagcggcgtgccgctcgctttccggtggcagcagtccgtcaataacgggaggtggacggatcttgcggacggcggcgggtatgcgggcacagctaccgatatgctgatcatcgacaatttgcagcaggagcaaaacgggtacaagttccgttgcatggcatccaactatgggaattatagcgcagatgtcatatccaacgccgtgactttgacggtgaacgcagagccggcgctgcagccgcccgctgcgccgtacgacaaggcggcccccggggatctggtattcacgtacaccggcgctatcgccggcccggacgtcggagtgtctgcccagttcacctacctgcccacaggggaggtaagcacaaacctgccccctgagagccgtaccggcgcgggggatggttttgtgtacacaccggacgtgggggtcactttcccgctggcgctgatgcagcagcacgccagtcccaatggcagcggcgtggcgggcctgcgcactgggcggtaccgcttggacctgacggtgatgctggctgacgacgtcagcaaggtatattccgccgagtttgaaatcattgacagcacgccagtccccgtgcccaaacccggatccaccatcccacagaccggcgatacggcgaacccgctgttctggctgctcatcatactggccgctctcgcggtttgcgcttccctgctgctctatcgcaagagaagggcaaaggattcaaaagcaacagggatcccgcgaaagcggtaggcgcggggccctgaaccaagcagaaccggcgtgacttacgccacaccggttctgccttatccctattttacgtccttgtgcgtctccgggtaactggagatgcgcttttttgcttattactttacagcagctctattttctgtcttgcttttttttcgacctgtgtcatgcagctttgaaacatcacgatccggtcgaacaatttctcatcggcttctatctgccggcggagttcctgtccaaaggccatccgaagtgtggtgcccagattaaccttgcggaccccgcacagaaccagctttttcagatctgcatcagagatgccggaggaaccgtggatcaccaggggggtgtttaccgctttgtggatctgttccagcaggccgaactgcagtctggcagtctgggtctgcatccggtgtacggtgcccacggctacagccagcgcgtctacaccggtacgttcggcaaattcctgtgcctcctccggctgtgtgtaacgggcctgataggtatccggtgcgtcgctgtatccgacggctccgatctctgcctctgcgccggccccaaagtcccgggccatctccactacgtatttggtacgggagatattttcctcaaagggaagctgtgaggcatcgatcatgacggaagaataccctgtttgaagagccgcctcgatcacctccaggtcatcggcatgatccagatggacgcccacggggacggacgcttcccgggccatctggatcagcatccctcccagaagatgtaccggcatatgggcaagtgcaggcttattcgtcatcaggatcaccggacggtccagagcttctgccgcgtcaatgaccgcccgggcgtcctcgtatccgaagacattgaaggcggcggtgccgtgtccctgttcttctgtgatctgtatgatgtgtcttagtgtgtccagcatatccggctcctttcatgaacaacgggcaatcatttccccgtaggtgtctttttcttttcgtatgaacgcctcaagttcttccatagaaggcatatctggagaacatccatggcttgccaccagcatggaagccgatgcgctgccgtgttccagacagtcgatgatctcgcacccgtccagaagacagcttagaaatgcactgccgtatccgtcgccgccgccgaagcccttcaatgcctttaccggaaatgggcggatggagtaggcaccgccgtctgccgtataggcggtagatccctctttgccgtgtttgatcacgacgatcttggcattttcccgcatccatttgtctgctgtaccggcgtcgtccaggccgtcgcagagcaggtggtccataagctcatactcttcccgggaacccatgatgatatccgcctgccgggccgccatcgtataatagagagagatttcatctttattcttccatgtataggcgcggtagtcgacgtcaaagatcacgaccacctgatgttttctggcaagttcaatggctttaaagaccgcttcccgtgacgggccggcagagagtgcggtgccgctgacgatcagcatccggctttttttgatgtacgcttcctccacatcatccgggcagagcatcaggtctgctgcctggttccggtacatgatcaggccggattcctgttcgctcagtatttctgtaaatgccagccccatggattccccttctgtacagcgcacgatgtgggaagtatcgatcccttcctgttggaaaaaggactcgcagaaatcgcccatctggtcgtcggagatccggccgataaaccctacttttttgccgaggcgggccatgcccaccgcaatgttggcaggagacccgcctacgtattttttaaaggtttcacactggggccagggtttaaagtaatccacaggattaaagtcaatggtgatccggccgatgggtatggcatccagttccctgccggatggaaaagtaatgtatttcataagaaagcctcctctgttattatatcgttccgtcccaggtggtgacgtcggtagatctgctttcttcctcgtcaaaccagcgggtagtgacaaccttggtctccgtgtaaaaacgatagccgtcttttccgagacagtgcaggtcgccgataaaagaattcttgtgtccggagaacgggaatacaccaacaggcaccgggattcccacattgactcccaccatgcctccgtcggtgtgccgtgcaaattcccgggcatagtggccgttctgggtaaagatgacagagccgtttgcaaatgggttttcattcatcagggccagcccctcctcgaaggtctttacccgtttgatgcacagcaccgggccgaagatctcgcgggtaccaaccgtcatatctctggtcacatgatccaggatcgtaggccctaagtaatagcctccttcatagccctctactactacgtctcttccgtccagggcaagactggcgccttcctccaggcctttttcgatccattccaggatggaacgcttgtgggatgcgttgacgaccgggcccagaccggtggtcttgtcgtaggccggtcccaccttgatttcttttgcaaggcgtaccagttcttctgccagcgcgtctgcgatcccctcctggacaacgactacaggcagagccatgcaccgttctcccgcgcagccgaaggcagcattgatgataccggctgcagtccgtttcagcggagcgtcattcagtacaagggcatggttttttgcttcacagagtgcctgcacccgtttgccggaggaagcagcctctgaatagatatgaagtcccacggaagtggagccgacgaagctgattccttttatgtccgggtgatgaagaaacagttcggactcattccgggagcaggtaacaatattcaggacaccgtccggcagcccggcctcctgatagagctcggcgatacgcaggcaggtctggggcgtgaaggtagcggcttttatgaccatggtattgccgcaggcgatacacataggcgccatccagcccatggggatcatggccgggaagttaaagggaacgattcctgcaaatactccgagaggctcccggtacagcaccgtatcatagccggaggaggcatccatcagactttctcccatcataagagatggagcggagatggcctgttccgtgccttcttttgccttcagtacatccccttttgcctcttcccatgcttttccgttctcttttgccaccagcatcgtaagctcgtccatgtgctcgatcagaagttcacgcagacggtagagcacctgtacccgtttcagtaccggtgttgccgcccagccggggaacgcggctttggagcctgcgatggcagcttccacctcatcctttgtacagcagggaactctggctgtgatctccccggtgcttggattgcatgcataggtatatttttctgtggcggacggctcgaacctgccgttaataaaatagttcagtgtctttgcttcactcatgttttctttcctcctaatattattcattagtcataatagccttccgttgatttggtcagtgtgtcaaactgttccatatcgtgtccaaacaggatccggcagttgtgttcccttgcatatccggtcaggaaacggacggtcttccggtacccggcggaatcatacaggatgcccggcggggagatggaaggctcgatattctccctcagataaatggcgtcggctgccagcagaaagtttccgctgttgggtagccgcacttccagcgccagcattccgaaggaatggccggggcccagattcaggatgcgtaccccgggggcgatctccaggaaggcttcctctttcagtaccggcctgaagtggagcccggccgccagaaaatgctccacatcggaaggaacgtggacgtccatatcctgccggagcgcatattggcgaagggtgttggtaaactcctcatcatttacatagatctgtgcattggaaaatgcacttaagttaccggcatgatccacatggagatgagacatgaccactgcccggatctcttccggccggatatggagctgctccagccggttcagaaggagctgctcttctgagaccatatacggggactgtttttcgataaatgcaggccagttcttacggaaatcaggatcgcaggccgtatcaaacagaatatagccgtgtggatggtcgatcagaaaggtgtggatggggatctcctgccatatgatgtccgggttcttacagtctgtggtggcgctgttggcgccggccaccaggtaagatttatccaggatttccgtgccgttatccagtacatataacttcatagggtttctcctttcctatagaaaatgacgttccagcacagccctcatgccgtcctgacggatttcagcaagataagaggcagtcaggtctgtgagtcccttgatctcgttcagatcctgtccccagaatccggtttgtcccagtgcggctcttgcataggaatccggcggcagacaggagtggtctttaaaaaaggaaagggccgcggcgtcgtcccggatcagatattcttttccgttccgatggcccacaagtgcgccgtcctgcatcttgctgccggtatagaaggcaagcagagcggcgaaggaaaatacaagccgtttgggaagcgcgtggtattcggcttcataggccagaaggcttggcatgcaccgagtcttccatttggatacggaattcagggagatggccaatagggaatggcggatataagggttatggaacctgcggatacaggtgtctgcaaactctttcagatcgtcccttggaagcagcagtgtggggatgatctcctcatacatgataccgtcgataaaggaggtaattgcaggcatgtccatagattccagcacatagtcgtttccggccagataagaggccagcacgtagccggtctgggtaccgttcaggatccggacctttcttgtcttataaggcttatggtcgtctgtatagatgacgggcaggccggtcttgtcaaaaggcagttccccggagatgtcccgttccggctcgatgacccacagtgcgaagggttctgccgtatccagcagctgatcccggtatccaatagactggaagatctcttcggcttcctccttcgggtatccggtgacgatccggtccacaagcgtactgcagaaagtgcaggccgtattcagccagcggccaaaatccggatccagattccagagagaggcaagtttcagcacagtttcttttaacacactgccattatgatcgatcagttccaccgggaggatcacgagtccccggtccgggtctccgtcataatgcagaaagcgggcgtacagaaatttggtgagcttgcccggataggagtggggcggctcatattcaaaacgatccgttttatcatagacgattcctgcctccgtagtattggatacggcaaatctgagagtatcaagacaagccagatccataaatgattcatactctgtgcaggagtcgatgatccggtctacacttgtgatgatccggttggatatactgggggatccatccttctgctcacgcagggagaccgtatactggcagtcctgcttccggaagggttccacactcccgaatggtatgggttttacaatggcaatgcttccattaaaatccgttttttcatttaaaatatcaaacatgtaatctacaaatgcacgcaggaaattgccctctccgaactgtatgaccttcaccgggcggtccggagcatttgtaagctttttgttcagttgttccatcgtcagtctcctttagcaggtaaaatcaagcagcaccttcagcatacttccggaatgccggtcaaaatcttccagagcttttggtgcgtcctcaaaccgatattcattggttacaatatccagcgggtcaaacgtcccttctgaaaacagggcgatcacgtccataaaatcttctttcagcgcgttccgggagccgaagatattcagttcttttttctggatcatcgtataatgaaagtccagtgtctgattgccgatgccgatgacgcacactcgtccctcgtagcagacggcgtctatgcagttctggaaggtggacggaagtccgaccgcctctatggctgcatcgaagagatctcctccggtggcgtcggccgctgctttcaggaagtcgtcagggccggaattcaggatggtaccgtcggctcccatttttgaggcgaagcttaatttttccggaaccacgtctgccacatagacttctgccccgaagtgtttggccgccagcatggcattgatgccgatggtgccgctgccaactactagtactttgtcgccgggctgtatccgggccctgcggactccgtgataggagatacagaatggttccacaagcgcaagccgtctggcgtccagcccgttcccgttataaaggcgttctacaggcagcgtgatatatctggaaaatgcgccttcccgatggcagcccatggtctgattgtccacgcagcagtttaagaatcccctgcggcaggaatagcagctgccacagttaaaataaggattggctgttacgagcataccgggtttcaggcctgcgccgttttccgggatttccagtattctggcggaaaactcgtgtccaggtatatttgggtatatggcataagcataattgccccggtatgtattcaggtcactgccgcagactcctccatatacaagttccaggagagcttcgccctcttttgggacaggatgatctgccggacggatctccacagacccgggcttcgttatatagatgctttcatttttcttcatcgtcaggtctcctttgttatgcattgggcgcggatccatgaggtgaagctgtgtgtgattccatatagataagagattactgcgattgtacgcctggaatctttaaaaagatagaaagatattcggaaaggtcggtgagattttcggaaaaagaaaaaagtgtaaaattttcgggcgaaaaagtaaaatatacatacgatatggaaataatgttgaattagtgggaaaattatagtattttttagtcaccctcacacaaccaggggcgtggaaatgacggtgaaatcaaagtaaaggagaaagagcagagggaatgtgtggatgagagccatatagacagcagacaggaacagttggaaaaaggaggaaaaagaatgaagaagaaggtattatcagtattgctggcagccgcgttggtatttggccttgcagcatgtggatccaaaaatgattcgaaagacgacactgggaaaaagacagaagcttccgataacaaggagaagaagacaaaaggaatcaagctgggaatttccaacgggtattacggcaatacatggcgggcccagtatgtaaaagggatggaagagctgtgtgagcagtataaggcagacggtacactttctgattatcagatcgtaaacagtaccggcgacgtgacggaggaactgaacaatatcaatggcctgatcagcagcggagtagatattctgatgatcagccccaattcaccaacatccatgggaagcgtcatccagtcggcgatcgaccagggtatcatggtcattatctttaatgatgcggcggcctatgaaggaacctactgtatctataatgaccagagcgccttctgggagatccaggcgaaatggttcgcagaaaagctgggcggcaagggcaatatcgtacagatcacgggaagttcaggaaacagtacaagcgaactgcggatctcatgtgcagaccaggtattcaaggattatccggacatcaagattctggcgtccgcacccggcgaatggtcagagacaacggcacagagtgtcatgtcaacattcctttccacttacggggaggaaattgacggagccatggcagaggacgttatggcgaacggacttgcaagggcatatgaaaatgcagggatcgaaccaaagatcatgtccggcgatacacagaagagctttattgactggaatctccagcatccggatgtggcaacgatcgcttccccgtctgtaccggctatcggtgtaaatgccatcaatatggcgctgaagctctatatgggagaagaattgaaggacgacgtactgcagccaaatcaggaagatgaatccatggtaaatgccatcgtgatcccgatgccgtttgtcattgtgagccaggaagaagataccaccggaccatggaccaaaggatatgacgacacacaattcattacaaccaaagaggcagccaaaatgtgcgaaggcaaagaagattcttatatgctcgatatgtctatgagcgaggaacaactgaattcttactttaagtagacatttacggcaggccttaacttttccgcaagttaaggcctgtttcataaaagcagagaaaaaggtgatgaatgatgaaactggaatgtaaaaaggtcagcaaggtattcggggccaaccctgccctcacagaagtagacctgacggtggaatccggcgagatccgcgcacttctgggcgggaatggctcgggaaagagcaccatgtccaagattatcggaggagctcttggcatgacggaggggaccatggagatcgatggaagatcctatgcgcccagatccacgatagaggccagacgcagagggatcgtcttcacttcccaggaactgagtttatttgacaacctgacggtggaagaaaatatgatgctgtgcggcttttccgtaaagcatacgataaaagtgaataaaaaagaaataaacgaaaaggcccgtgaatttctggatcactatgggcttttgcatctggcggataaaaaggttggggacttggcggcaaatgaacagtatatggtggaattcatgaaggccatcatccagaaaccagagatcctcattatagatgagattacgtccgcgctgtaccgggaagatgtaaagatcgtctggcaggtgatgcaggagctgaaagaggcagggaagatcatcctgttcatttcccaccgtatgccggagatcatggaaatgtgcgactctgtcactgtgctgagaaacggagtgatcgtaggttccttcgccacggaagaggtaacggaagcacagctggtatccaagatgaccggccgtgagatcgcggccggggcaatacgggaatcacaggagaacgatatggaggaagaggcggatgtcctgctgaaggtaaaccggatgcgtctgccccagttcgggacagaagtcgacctgagtatccggaagggagagatcatcggtgtggcggggctgcagggacatggacaggcggatcttgtaaggcagctgttcgggctgtcaaaacagatccatcctgaagtggagcttgcaggggagaggatacgcatccactcgccggcgtctgcgatctggcacgggatatcctttatatccggtgaccgcgggatcgaggggacatttggagaacgtacgatagaggaaaatgtacaggctgtgccggaactgatccttcataaaaaagtggaggaggacgcagtgctggaaaaatataaagtaaaatatggaaataaaagagacctgatcacatccttaagcggcggaaatcagcagaaggtggtcatcgccagatggctgtcctgcaatccgaagcttctgctggccgatgaccctacgaaggggatcgatgtgcaggcaaggacggacgtacataagatcatgacagatatggccagggaaggctcctctgtacttatggtatccagcgacgatgaagagttggtgaacctgaccagaatggcagacagctccagagtcatcgtcatgtatgagggaaggatcgtcaagacgctgcggggcggagacattacggtggaaaatatagcagcggcatctgtaaatatgcagaaagaggcagaggaggtgggacagtcatgaagaaaagtaaatacgcctggctccggtggccggccctcccggcactggtcatgtgcatcgcattttttattttgaatatatttgttactcagggctttttacagtcttatgtcatcctgggatttctctcttccaatatcccgctgctctgtgtatccgtaggatgtgccggagtcatcatagccgggggcatggatatttccctgggagcgatcatcagccttgtgaatgttatttttgtgaagctttctgagaccggaatgagtctggcggcacagatcacggtctgcctgctgctgtcacttctgatggggctgctaaatggcattatcattggatggtggagagtgacccctcttctggctacctacgccacctcgtctgtatatgccggcatttcattgtggctgcttccgagaccaggaggaatcatagcccgcgaattcaccatgtggtataacagcttcctgttcggtgtgatcccggttccggttttatttgcagtactgatcctggcgctgtgggcggtgctgatgaaatcgccgcttagatactggttgtacagttccggacgtgacggggcgaaggcttatgtttccggagttccagtctaccggacacaggtgttttcctatgtgttcgcagggctgactgccggtatcggaggcattgctctttccggttcgacccagggcggggatgccacagtgggcttaagtctctccatgaacgccatagcggcctgcgtgatcggaggcatcagtctggcaggagggatcggcgccatcatcggctccatgttcggtgcactgttcttaagcctggttaccatgaccgtactgtccgctcatgtatcctccctgtaccagagcctgatcaaagggatcatcctgctggccggcgtactgttcagcctgttgatcgagcgcagaatattaaaggagcacaagcaggcgggaccgccgggcgggaacatagaaaaagacaacggaaaggaggcggcttaagatgaagaaagtaaaagcagtctataagaattcctctctgcagagttatcttcccggcatccttgcaattttcgccctgttaattcttggacagatcctgaggccggggttcgcgtcttccggaaatatatccagtattctgaacctggcttccgtactgtccattgtctgtatcggacagctggtggtcattgtggggactgggggaatcgatctttccaccggcgccaatgtatccatgggagcgctggtaggatctttgcttctgttcggaaagatatcctgccttccgctggccgttgcaggtactcttgtcatcggcggggccgcgggactgatcaatgggatcggggtccgttactttaagataccggcgctggccatgaccctgttcatggcgaccatcatagacggatttaccatggccgttacaaagggaaaaccatccctgaatctgccggtcatgtttaaggaaatgatcggtaagccttttattgggaagttctgtccgatcatcctcattgcatttgtcattatcgtgctgaccgagctggtgctccgcaagacagtcttcggcaaatccatctacatgctggggagcaatatccgggcggcaggcttatgcggcttaagggtcagtgtcatatctgttctcgtatatgtgatatccggcgccatgtcctgtctggcaggcctgattctggtgggatatgtagggagcggtcagatgaatatgggaaatacgtataccatgctttccatcgcggcagtcgtgatcgggggcacgaaggttacgggaggaaaagggacgctggcaggcggtgtgatcggctcgatcgtcctgatgctgctgtccagtgtactgacgtccatgggaatgccggaaggagccagacagtttgtccagggactgatcctgctggtcgtactggtcatcaactgcaggctgccaaggttccgccagtagtcggcggaacgggcagccaggggtccggcccggcagttaagaaaggagttatttatgaaaggattaaaatttacgatcttatctcacggttacatagaaaatgacctggcctggaacatagccatgccaaatccggccacgaagagcaatccaaacccaaagccgtcctggatacaggcgccgtcctattccgtactgatctcccatcctgagaacggttatatcctgtatgatgcaggatcctgtctgggggatgaaagggaccggagacccgcatctatggcagacatttttccgctgtatatagaaagggaagaatttctggacggtcagcttcataagctggggctcaccgtggaggacatcagtcttgtaatactgtcccatatgcactgggaccacagcggggggatgggattcttcgaggacaaatcaacggtgcagaaggtcatcgcttcaaaggaagacttttccttcgggctgacagagacgatggcgccatacaaggtggcggaggattgtgcctatttccgggaaaattatgccttccgcaatctggattatgagcttattgaagaggattgcagcctctgcgaaggaatagatatgatcctgcttccggggcatacgcccgctgtgctgggacttgtgctccatctggagagtgggacggtgatctttccgtcagacgccatcaataaccatgccaattacggtccgaacgccaaatcaccggggatcatatatgacacgctgggattccgaaaaacagtgaagaaggtgatggagcttcagaagaaatatcatgccaggatcatatatccgcatgatatggagcagttccgtgaactgaagaccgctccttatttttatgaatgatccaaacggatgaatggaagatattaccatgtggtaatttatccccgaagtctttataatgaaatcagatgtctgcagacatgagagggatcggcggttatgaaaaaaataaggaattttatgctgaaagacaaactcattacatggtttgtcttatcagtctgtataccgatcatattatttattgtgatcatcatttcttatcagaattatctgatcaatattgagatccacaagtatggggaccggcagatcgcccagctgtctgaacggctggatctatttttcacgcagatccgctctacttcccgactgtatttttacgacgatacgatcagcgatattctcgcaaaccaccagaatgaagacaaggaacagtacttaaatgaacagcttaagcttctggagctgcagaagcggcacaacgccaacatgacagatgccgctcttgaaattacgatcatcaccgatgattctaaaatatacggcaccggtctgtataactcccaggtggaggcatcggatgtctatgagaccggctggtaccggaagcttgaggagaatccatgggccgtactctggatacgggacgatttcctgaaccgccttcactgtcagaaatccctggattacatctataatgtgtgggtactgaagaatctggagacttacgaaccccaggggcttttgatcattggattcaaggaggcggatttttgcaatctctaccagaaatatctggacaagcaggacagcctgatcgtatatggaacggacggggaggtggtgtccagcgtggggaacgacctgtttaaggaaggacagatgaagcagatcggcagagaagtgaaggatgataccggcatgctgcgcattgaccgcaagaattactacgcgtccgcttccggtatcccggttccgggctggaaagtacagatgctgacgtcccagtcaaaactactgtatgagtataataatttcagaaatatcatttacattgtattctcactgtacctgatcattgttctggtattcagtttcatcatcgccaaaaatatcatatcccccatccatacgctctggcagaccatagataaagccagcaagggaaaattgagcgtccgggcggtggtaaactcgaatgatgagatcggacatctggcgggctcctttaatgagctgctggatgaaattgacgttctgatgaacaatatcatccgggagcaggagtataaacggaaggcggagatgcagtcgctgtatgcccagatcaacccgcattttatctacaatacactgacgtccatccgttatctcgtctatacagaagaaaaagagcgggtagattatgtgatcaaatcctttgtagggcttctgaagaattccatctcggattccggtgaactgtggactattgaaaaagagatggatctgcttgataaatatatcgagatccagcagatgtcctttgaggacgccatcgacgtccgctatgacgtgccggatgaactgaaagactgccggacgctgaagctgatcctgcagcccatcgtggaaaatgcggtgatgcacggactaaaggcgaaaaagggcagtaaacggctgaggataaccgtggaaaaagaggcaggccaggtagagatccgtattatggacaacggggtcggtacggcaaaggagctgacctttgaggatgcggaaatctgttttgacgagaatatcggcctgaaaaatgtgcacagcagaattgagctttattttggaaagccgtatgggttgacatttgcaagcaggccggcagaagggacggttgtcacggtctgtctgccatacatagaagcggagggggattttttctgacatgaagatattgatcgcggatgacgatgtgctgatccggaaatggcttgggctgctgatccggcaggcggaaaaatatgatacggagctttatcaggcagaaaatggggaggaagccctcgccatcatacaggaggtaccagtggatcttctgatcacagatattaaaatgccggtagtggacggagtggagctgatccggaaggtcagagagatccatccggatatccggatcgtagtgctgagcgcatatgacgattacaactatgtccggacgacactgaaaaacggggtgctggattatcttctgaaggcggagatggatatggaggatatccacgccattctgcacacagtggaacaggatatgtttctggagaataccatggaacaggacaaccgggaacagatgctggaagactgcctgccccaggcggagctgttccgtggattctgggaggatgagtctgtcagcgcggatgaatttctggagaagtccggtgcagggcttggcagggcgcatctgtttttatctatggtgtgcatggacgcaagagggaagatcatgctttcccattccaagatcatcgtcattatctccaatatattaaaggggaaaaatatatgtaatgtggtgcttccttattatgacgacaggttcatcattctgtacaattcacaggaaactgtgtttgaaaaacagaaagaggaaaacggcctgctcatggcctatatcgatgccgccctgaaacggtatctggactgcaggatccagtacagcgtcaacgtcaggctgaacagcgtggaggagcttcgcagtaagatcatggaagaagagcaggtgctgctgaaaaagcagtattatcaggacccggagctgcaggttcttcggaatgcggaaaaagaggaagcttttgtggtcaaatacaaggaccagatcaaatatgcattggacaaccgacatcccgtacaggcgggagaactgctgcagcgcttcatcagaaaaagccatggagaacgtttaagtccgaagatcattctggcaggctgtaccgggatcatgtacgatcttatgaattatatagtctctgtcacaggagaggataatatctccagaaccgaggaaatgatcgtgcgtcttatgaagatccagacagctttagaactggaggaatatatgaaagaacatatagagcagttctacgagatcaccggcagcagccccagaaagtattctccttccatagagaagagcatcctttacatagaagagaactgtacggaaaagatcagcctggagcaggtagccggcaaggtgttcctgaataaaaattatttctcggaactgttcaaaaaagaagtgggtatgaattataatgactatctgaacgaagcgcgcatccgcaaggcatgcgcctatattgcatccggtgagtattccctgtcccaggtggcgcagatgaccggattttccgaccagaattatttcgccaagatatttaaaaaagtggtgggagagacacctatggggtatcggaagaggctgtaggggtggaggatactgtcagacgagcagaacgatggagagacatcctgaacatttttgcaggtcaaatgaacaggccaaagtctctgtcttgcagagtctgtaaattttatcattataccttgacatttattatatctgaacatataattaactatacttatagaacgattcatgtttaatgagtgcaacacgagagatgtctgcagaccaggtacacaaaatatcagggcttgtactggtttcgacgggggtctggaagttggagaagccatccgtagcgggacactacgttaaaagttccaattaaatataaacgcagacaatagagaattagcgtacgcagcctaattaggctgcagtcggccttaggttttccaccgcttaagtaaccggcttcaaatagggtggagcacttcgttctcaaagctttgagggaatggaagaacttatgaagctactgaaaccggaagcctgtcattaggcggccggcagagggaatgtcaatataatgactgtgatgggagatgcttcgatggaggggctttcggacgcgggttcaactcccgccaggtccattttaaaaacgccgtagttacggcgtttttttcttttcatgctgcacatcgtgtcacatagattggtggaaccacaataatttaaataaatgtccctctttgtcctgacaattgctgataagatacagctaccaatgaacaaggaggaacaaagaatggaagaaaacacaagcttcataccggaaatttatatcggtgaaaatgggaactggtttatcaacaactatgacacaggagtcaaagcaagaggtgacgacggtatcacgccgcacatcggcgccaacggcaactggtacattggagattcggacacaggagtgccggccgccggcccgaaaggggacaaaggagatactggtccgatgggtccacagggcgcaaccggcgctaccggtccgcagggattaacaggtcctcagggactgacaggcccccaaggtccgacaggtgccaccggtccacagggcgccacgggtccgaaaggtgataccggcgccgccggtccgcagggaacaaccggcgcgacgggaccaaaaggagatccgggagtaaccggcctgcaaggtccgaaaggtgaaaaaggagataccggtgcgccaggagcacagggcccgcagggaatccagggaccaaagggcgataaaggggagcagggaccggccggtccggtaaatatcgcgaacaacctagagacgacagaagaaggatatgcgctggatgcacagcaggggaatgttctaaaagaaatgctggaagaaaatattatttataaaaacgtcaatggctggcatatctaccaatatgcatccggtaaagtagaagcatactttaccgacccgcgtggagatgtcgcattaacaggtttaagggcagcaggggtttactctcataatgactatatcggaagaacatatacctttccaaagaacacttttactaaaatacatttcatagatgtgaatgttcaatcaacgggttatacacagtgtcaggtcgcatcgtcagatattaacaaagttattataagagtatggtcttcatactcaactacagtatcagggttaagagtcttattaaaagtagtcggccgatggaagtaatagagtttaagattggagagcttggaaacgagctctctttttatacgggagaagatagaagacaacccttctgaaccggagctgcttgtcacggtaaagggtttgggctataagctgaagaaaaggaatgattagatgaaaagatccgggtaccgcacaagtctgcatatatattttatatttctgctgtcactgctttgcatactgataacagcttctgcgctcttttttatgctgatcacggtccgaaaagcagacgggactatcgtcagaagtgactggccggagagctttacgcaagaatttgaaaaacagatcgtattcattgacggaaaaccgcgcgttacgcaggcaggtcttgaattgctgcaaaaagaagaactgggaattcagatactggacgcggccggacgatgctgaggaggcagacagaatgttccacctctattacggtagaagagtttaattcagacgccacccgcacggtaggcgcatttctggagccgatgcacagtatgacttatctgctgatcaattatatgcagaggcgaagaacgatagccatgtaggccttgatacaccgacggaaggttcggtatacatcaatggaacagacatcagtcactttaacgacgcggacggccatagcgcgcgcgctgatcggcagtcctgagatactctttgcggacgaaccgaccgggaatctggacagcaggacgggataataagttaacagcattttttaaaatatgttgtaattacaacatacagagccatatgattgtattatactgaacgaggaaagttaccttaaggaggacaagaatatggtacgtaggatcatacagatcgatgaagaaaaatgcaacgggtgcgggctgtgcgcaaaggcctgtcacgaggaagctatcaaaatggagaacggcaaggcgaaactgctgcgggacgattactgcgacggcctgggagactgtctgccggcctgccctgcaggggccattacctttgtagagcgggaagcggcggcatatgatgaggaagctgtccggaggaataaaaggaagaaaaccaatgaaaaggatggtacactgccgtgcggctgtccgggcagccattccgggcagatcgtaagagagccgtcctccggggcagcctgtcaggcgccggcagtgcattccatgcttcggcagtggccggtgcagattaaattagcgcctgtaaacgcgccttactttgacggcgccgacttgcttatagcagcagactgtacggcatacgcgtacggcaacttccatcaggaatttatacgggacagggtgacgctcatcggctgccccaaactggacgacgcggattacagtgagaaactggctgagatcataagagagaacgatgtcaggagtctgaccatagcaaggatggaagtgccttgctgtggaggaatcgaacatgccgcggcatcagctcttaaggaaagcggtaaatttataccgtggcatgtcgtcgtgatatcgacggacggacatatattagagcgttgatgactgaaacggtttctattcctgccataaactgatataatataaaaaattatatttaatgtaaggagtcggcgttatggcagataaaagagaaaagtggatcctcatggcagtcctgccgttcattgcagttttgctgttggcagtgtggagcgtcaagccgcacgtggatgaggtccgcacgatcgattcaaaagccgggacatgggatttggctgccgccggttttgaacagtcggcagtcaggcttgacggcgatgtggagtatgtgccggatgcgctgctttccccggaggaattttcgcggcgcggcgacatacgggcaggacagccgggggatgagactcaatatgctaccagccggatgcgtctgataatgccgcgcggcagctatctcatctgcgggtacagcgtggacttcgcaagccgcatgtatgtaaacggtgaattgctctttgaggcaggcgcgccgggagacagccgtgaaacagccaggccaggcgtgaagttctttgtgctgcctgtgtcgccggatgaaaacggagagatcgtcatcgtgcagcaggcgtccaatttcattcataaggacggcgggtcctacggacatttttatatcggcacgccggaacagatcgaccagtatatttcccgggatctttggccggaaatcatattaatgggtgtgtaccttgtgctgtttgtcgttcacttgatcttatatctgatgatgaggaactacaaaccgaatctgctgtttgctttgttttgcctcacgtggtttgtgcgcaccggagttaccgggcagcggctgctggatgtgatactgccgaagctgccgtgggtggtcttgttccggcttgaatacctgacgatgccgctgagcggcattctgctcgtgtggcttttatacctgatcttcccaggtgtgctgcaaaaatggttttcactggctgccagtatcttgtgcgggacagttgccgtactggatgtgttcgcttccacgctgctgatatcctacacagcagtatggcgtgtcgtgctgctgggagtcattgccctgtatttttttgtgcggctcattctgcgatggcggcggccggccgcggaacaggctgccgtgctgtcagggtttgcttttctggtgtttgcggccgtttgggacatgtgctatcatcgggatgtttttctgctgcctgccctgcgttttgccatatcggaggtggcgatggctgtgtttgtgctgtttgccatgacggcaatgttcttcggcaccatgcgggaagtgcgcatggccagagagcgggaggagcgtatggcggcggagaaggcggcggcggaggagctggcccgcctgaaaggcgaattctatacagatctttcccatgaaatgaaaacaccgttgacagtcatggtagctaacgccgaatttgcggccaggaacatacgggccggagccatagacgaggagacgggtgtagacctggatgccatcgcggcggagggcaggcgtctagccaagcttgtaaatggtcttgtgaatctgaaccggatgcgggataagggcgcgcaggacaccgtggtgtcccttgcggaactgacggaggaaactgcccgtacatataaggcgctggctgaaaagcagggcagccgcctgtcggtggagatcgaatccggcctgcctgcggtgaacggcaacgccgaccagctggcgcaggtggtcataaacttgctggcgaatgccggcagacatacgagggacggagtgatcacagtgagtcttcgccgggagtcagggcgcctacgcctggaggtagccgataccggcgacggtatatcgccggagatcctgccccatatctttgaccggttctgccgcggggatgagagcggcacagggctcggtcttgccatctgcagagagatcatagagaatcacggcgggaaaattgatatacaaagtgatatggggaaaggaactacagtgtggtttactctgccggtcataggagaataacagaataagcggcgaaataaaatagtgcgtagaattcgttcggaattctacgcactttgctgtccggcgcgatcaaaataacatatttttcgagaaaaataacaaaagctttttaaataagctttatttttttgaataaaatcgtaacaaatatgtaacaattgtaataaataaaaaatatctgaatataattaattaaaacaattttaaaatattgttattttcaggagggtataaatttatgaaatctaaaaaacatgtggggcttctcgtaacattgttaactgtcacgtcgctgtttaccgcagggtattccagcgaagcggcggcgggtgaaccggaggctttgcctgtaacggcggatgcaaatgcagataaatacgcatcctgtcttatggacatgaaagagacaacccagaagataatagaagaacagcagagaatagcagaagaaaaacggatcgcagaagaaaagaggatcgcggaagaaaaaagaatagcagaagaaaaagcagcccaggagaaggcggcgcaggagaaagcagcccaggaaaaggccgctcaggaaaaagctgcccaggaagcggctcaggcagcgcagcaaagggcagtttcggcgagccagtcagaccaggaccttctggcggcgatcatattctgcgaggcgggaaatcagccgtatgacggacaggttgccgtaggtgcggtcgtaatgaaccgggtgagaagcggaatcttccctaattcgatccgtgacgtcatctaccagtcaggacagttcggtccggccgtgacaggctggctcgatcaggtactgtcttccggtgggtacactgacacggcaagagcggccgctgcagacgcgcttgcgggagctaacccgataggggactgcctctattttgaccagggtggatctgggatgcagatcggggcgcattattttcattaagtgagaatttaactggaaccggcgtggcgcaagtcccgccggttccgcttggttcagggcctcgcgcccaatttggagcggaacgcggattttacccacataggtaaagtaaaccttgatggtgatgtgctttttcctatcaatcttttctggactatgcaccacaatcttgctcagtccggcgcggctgcaagccggctgatttcggtctgctcccgcccggactcacccgacagctattaagtaccgggcgtcgctcagcttgcccggcacaacgatgttcgttccctaacttggcccggtctgcctgcaccttaccagcagccggttttccccgcccgcgagtgccgccagcatgatgagcagccagggcagcaggttcgcagtatcgcccgtttgcgggatggtggaatcgttgatggtgattgtcaccgtgaagggcatcccgtccaccgcgtaagtcgctgtggccttgccggttttcagcgccgtaaaggtgtaggtatcgccgtcctgtgtcattttgagcaaatccttgtcatagctccagacgccgcccgcgggcacaggcgtccagctcacgctctggcctaccagcagggtgtaatcattcggcaggccggtgatggtggtcgtaccgctgggctgcggcgggtccgccggtttgaccgccatacccaaaggcaagaagccggtattggaacccttttcgtaccggatgccctcgagcccattatccaagttccattccaccgtagcggctgcgggtgtatagcttaggtcgttatcggtgccagccttataaggggcgttatcatctgtctgtaaaatgacgaggccgtcgccgctggggccggggaaggtaagagcggggtcgtcatacacaacggctttaccccggctgtataccgtgccgttgtcctttatctgcaccttatcctcgccgctgcccccgctatagatggcattgccattcgcgtccgtctgcatcaccgcgccgccggacaccgtgaaggtgacaccggtgtcatccacatagacggtatcgccgccctgcgcggcaacaaggccaccctgtatctccacgtcctgcggactggaatcgaggcacaccgccgctcctttgctgccggccgtattgccggtgatgctgccgcccatcatatggaacgtgccgcccgacacaatcaccccgccgccgttgcggaaggcctcgttgccctcatcgatgccgctgccgccaatttgggccgtgccgcccatgttcatggtggcatcggtgctcactgtcaccccgccgccagcggaggccgtgttgccaaggatgcggccgcctgtcatgtcgaaccggctgccggcgtctaccacgtacaccccgccgccggtgcctacgttggtgctgttgccaaggatgctgccgccctgcatgtccagtttactgtctgtgccccacacgcacacgccggcgccgttgtcggccgtgttgccctcgccggggccgctgccgccgatttgggccgcgccgctcatcttcatggtggcgccgccgtccacgcacaccccgccgccgaggctgctggcccgattgccaaggatgttgccacccgtcatgtccaatttgctatcggcgcctgtcacatacacgccgccgccgttggtggccgtgttggcatcgccgctgccgccaatttgggccgtgccgctcatgtccattttggcgccgtttgccacatacaccccgccgccacgggtggcggtatttcctatgattttaccacccgccatcgtaaactggcctttggcgcccacgtgcaccccgccgccatccatatcggctgtgtttccaaggatgctgccgcccgtcatttcaaagctgctgccggtgccgtacacatccaccccgccgccatcaccagccgtgttggcctcgccggcagcagtgccgccaatttgggctgtgccgctcattttcatggtggcgccgtccacgtacaccccgccgccataatggttgttgtcggtcttgttgcccgtgattcggccgcccgtcatttcaaagacgctgccggtgccgtccacatacaccccgccgccgtcagcggcctcgttgccggtgatgctgctgccgtcccgcatggtaagggtgccgccgcccacgtacaccccgccgccgctgcctatggaaattttattgtttttcagcacggccccatcgcccagcgtcagcttaccgccggctactactgccactaaaacatcgtgagccgatacaacgcccttgttgccgtccagcgccacgttttccagcgtcaaatcgccgccgctgcccacgttgaaaaaggcgtccgtaaacccgccatcgcgggtgatggtgaagggggcgccgggaatggccgccgagtggatggcgagcttgcgcgtcaccttaatggtgccggtggcggcggtgccatcgtccaccgcgttaaagctgccgccaatcaaaacctccgttgcggcaggttttgtgggggcgccggcgtcctccaccgccgctttcagggcggcccagtccgcaggggtgacaaacagccgcccgccctggtggtcaaaaacgccgttgttggctgtttccacccccacgccgtttatactgcttgacgtgttgtcgcccacttcgccgtccttcatggtgaaggttttgccagaagcgaccatcaccccgccgccgcgggcatctttggccgtgttgccggtgatgctgccgccgttcatggtgaaggcgccgttgtacacctccaccccgccaccgctagtttgggccgtgttgccggtgacgctgccgccgtccatgatgaaggcgccgccggacaccatcaccccgccgccatccatgcccgctctgttgtcggcgatgctgccgtctgtcagggtgaaggtgcagccgttgctcacatacaccccgccgccatcgacggggttggccatgttgccggtgatgacgccgtcatccatagtgagggcactgccggcgtccgtcaggtacaccccgccgccgtagtcggccgtgttgcccttgccgctgccgctgccgatccgggccgtgccgctcatggtcattttggcgccgccgcccacgtataccccgccgccgatgttggcactgttgccgtagatgcggccgccctccatgtggaaggtggcagtgctgcccgtcaggtacaccccgccgccctcatcggccgtgttgccgaagatagggctgtcccgcatggtgagggtgccgccgtccacatacgccccgccgccggtgctgtttttcagcgtggctccatcgttcagcgtcaggctgccgccgcctgccaccgttaccagacggtccgcattggccacattcctgccgtccagtaccaagtcgcctttcagggtgagggcgccgccgtcccgcacgtcaaacataacgcccgtatacgacattcgtgcaattccggcagttcctctcccatcgccgtggatggtcaccggatagtccaccataagagatcccattgcttcaaagaagaccatctcgatctcaatatccgcctcgcgggcattcagcgcgtcttgcagctcgtcccagctattcaccgtgacggtgcccgcccggggcgccagcgccagggtgtttgccgcctcggtcagcgtcacggtgacggcgggcggttccacgccttggccaaggccgctgccctcaggcagggcggacaggtccagcgtgggcgcaaaggtgtacacacccgccacatccgggtcaaagggggtgttgctggcccagccgctcacggtcacgggcaaagggacaccatccgcgccggcggcttccagcacgctgggcagcgccaaatcgtcctgcgaggcaagttcaccctcctcataactttgctttgccacctccggcgcaagggccgcaaacccggtgatggtgacgccgggtgcggacggtgcgctctccggtgtcttaccgctctcgccgccgctgccggacgcggaagcggcgggcgttgtactggtcaccgcgctatccggcgccacggacacgtccgtaccggccgacgccaatgccggcaccggccggccaaaggctacaaggcacaggcacagtgccagcgccagaagccgttttttatctcgttttttcatggggtctcctccttttgatgttctttccatttcagccgtcaaagggttttacgagcctactgagtaggctcgtgcagaggggtacccctctgcaaatcttcttgtgtgccagggccgccgcttccacgctccgcagccccaggccctccccgtggaggatggcggccccggcgctgttctctaccgtgagcacgatgtcggcctccccggtctcacaccgggcgcggatccgggctcccttgcctgcagcagccgcgcttcgggccgcgttctcgaagatgttgccgaagatcacgcagagatccgtgtccggcgccccggcgccccaggcagatccagcttcacatccagttccacgcccgccccggcggcctgggccagatagtaatagccctccttatggttgatcgatttgtttctaatgtaaaaataccacgaaagaaataaaaaagcaagtgaaacgagaaatagagattttgaaatgtagtgaattgcaaaaagggacggctgcgcgccctgtggacgctgaaaaaacggcgggagtcggtaaagtgacaggcgcgaaaaagctccatatgacgatacttcatcacatggagcttttcgtttttttcgcccgcttggcataagtcagtttttcttcttacttctttatggctcactgccaatggacaccgtgtcttttttacttatggttagtttttggattatgcggttttctgtgcgttttcttttttgacgatgcggctcaggatgaatgtgatgatggcgcagaggactgcggctatcatcgcgtaggcccatgtcatgttgtagccggtcctgccgtagttgtccatccagcttccgactaaggtgtacatgaagatatcaggtgtatatcccaggcaggaggcaatgcctgacacacgtccgctcatgttgatagggattccggcgtcgtcgtgtactgcaaagtattggcttcttacagcgtagatgaagaacaggcctacgaagaagttagctactaccataacgcagagagaagctttggacggcattacgatgaagaggccgaaagataaagcgaggccgatacatccgccgatgatgactttaaaccgggacttcattttatcggccaggaagcctccgacaataccgccggcgccctggatcaggtagcggacaccgccgagtgttgcggctgaagcggcggataatccgtagaactgctgtgcaaatgtggtcgcatacgcgatcagtccgtatacactgtaggcagtgaaaacaattgctacgagcagccagactctgggaatgagcagggccttgaacattccttttgtgatttctgccaaagattctgagttttcttccttttttgtgtcctcgataaagataaagttgaggatacctattataatgactacgatagagcatactttgatggccgctgacgcgcctgcaacttcatcggcaaaacgtgtaaatgcggctgtcataccaaacacgagcagtgcgttcatgataccgcggagaccttcctgcaggccgaacagacgtccctgttcttcgtcggtaccgagcatacgcgttgccttgatgcaggcagaccagtatgtaatgatagtagagatacccataagtacaaagataacgcggcttatggtatagccggggaaggtggagaaccaaagtcccaggatacctgtcgcgatgaaggaaaaggtaagcagtttccttgccgagaacttatcggcgataatacctcctatgaaataagagaaaagtgacattgttgcatatccggatgataagagtcccatctgtgcattggaaagattcatggcattctgaatcggcacatagaaggtctcacggatgtacggtaattgaaagatgattccggcacctgtcgcaagaagaagcagggtaccatactttttaacaaaagctttgttcatgatttcgcctccagatcaactataataatattggtggtacagacgctgcagccgccgtacctgttattaatgtaacaaaaaaagagaaaagtaatgccagggtggcgttacttctctcttcactctttgtaactaattcgaataataaaataattgtgaaaaaaagtcaatcactaaaagacaaaaaaacgaaatataaacattgtgcacaaaaagccggatataataatatgaaaaataaacaattgacaactcccggcatatggttttatactatatgcagttaccgaaagagattttcagagaaaagtaaccaacgtggcaggcgtactgcccgtgttgtgttgcttttctttttttgtgtttacggaactttgcaccgtgttgcgcttccttatctctttcagtgaggtatcaaagaaaaaacgtgttaatagtgaaaggagtccagagtcatggcaattatttcaagagaacaaatcgtagaagggttagttgacattcttggcagcgagcaggtcgtaacagacgaacaggtattaaaggagagcagtctcgacagatacagaaaatatgagcaggtatgtgaagtgtacacacagccgataccggcagcggtagtatatgtaaagagcgcggaggaagtatccgaggtgcttcagttcgccaatgataatgagatcaatgtagtaccgagaacaggacagtctgcgatcgaaggaggtcttgagacagcgcttaaggattccgtggttatcgatggttctactatgaataaagtgatcaaagtggatgagtacaacatgcaggttacatgccagtgcggcgtaccgcttcaggagctggatgacatgctcagagagagaggatatacgacaggacattctccgcagtccaagcctctggctcagatgggaggacttgtagcgacgagaagtatcggacagttctcaacgctgtacggcggaattgaggacatgatcgtgggacttgaggcagtattcccgaacggtaagatctgcaggatcaaaaatgtgccgagacgtgctgcagggcctgacatcagacatattatctgcggaaatgaaggagcgctctgctacataactgaagttacattaaagttatttaaatggcagccggaaaacaaccgttacatcggatatatgctggatgatgagtatatgaagcttggatttgactgtctgcgtgaagttatggtagcaggatacaaaccttcttttgcaagactctatgacgcggcagacgcgcagcagcatttcagcgcatggcttccggaaggaaaggctatcctgatctggatggcagaaggccctgcaaacattacgccggcaattgaggcagggatcaaagagatgatgtccaaacatccggagcttgaagaggttgacccgaaactcattgagaaatggtacggcggactgaactggggaccggagcagatcgcagaagaaaaagaagagatcaaagccacacagaatatcggtatcacgacagaagtatcaggaagctgggacaacatctatgatatctataagacagcatgtgacaggatcatggaagaggttccggatatgactctcatgggcggacattcttcacacagctacatcaacggtacgaatatgtatttcgtatactattataatatcgtagactgcgcgccggaagaagagatcaacaagtaccatgacagaatcaaccagatcatctgcgaacaggttatcaaatacggcggatctattgttcaccaccacggcctcggcaaagcaagagcaaaatatgtgacacaggaatacggttcttcctattatatgctcaaaactttgaaacaggcgtttgatccaaacggcatcatgaacatgggaacattgatccccctcagaaaataagccatgaagatattagggtgttttaaaatagtacctgatctggatctgatagctgaagaagactggaccgcagatgaccggcttcgggtagatacaggatacgcaaaacttttatggaattgttttgatgaaggagcactggaaatgatgttaaagctttctgatttatcagaaggctttgacgtcgtatatgagctgaacgcgctcaccgtaggcggacggcagcatgagacatttttaaagacgctttatgcactgaagtttgagcacgcggtacgggtcgaggcggacgaggatacggacatacgtttctgtccggaaattattgcacagatagtggcggatcacgtaagacataatgcggctcaggatgtggtagttatgggtatccagagttcagacggcagtaatatgaagacgccgctcctcctggcagaaatgctcgggtggccgtgtatcacccaggtgacggcgatggaaccggtggatgaagcgcatctgaaggtcacgagccaggaagatggatgcacggcggtacagacggttacggttccgtgtgttctggcggcagggaacgctccttccgcctatctgagggtgcctacgctgaaagacaagatgaagtttggcaagaagccggtcgaacatataagcccggactgggaaactcttttgggaagtaaggagggcgtctcagagccggctgtggaacttgtggaattgaagcaggtggtagagagcagggacacggtgcttattgacggagatactccggaagagaaggcggagaaactgtttgagacatatttgaaagaaaggcttgaaaaagtatgagatatcattgtatcataaatgcttactcggaagatataaaccggcagctggaagagttctgtgcttttaaacgggccttcctgtcagagtcagaagaaggagaagcctttatcctgtgccgggacatgtcagatgcagagaaattaaacggacatgtttccaaaagcgcggcggccataacagccggggaatattgccccgagacggtgcttgcggcattgcacggggagatcctgccggaagatctctatatcttcgggagcggatacagcggaacagaactggccgtacgcctggccgaacgggccgggggcagttccgtcacggctgttcacagccttgagaaaaaagaacggctgacagtccggaagatggtgtatgcgaatcatatggaaggcgcgttctgtatgagaagaggtccatactgcatatctctggcaaaaggaatggaccggcagcagccggagaaaaaagaattctgtgacttcagggagatccaatgtccgcagaagtccggatttgtggtttcaagagagacatgcgccgaagaaacatcaggcgggcttggcgatgcgaacatcgtgatagctgcgggcagaggtgtcagaaataaagagaatgcggagtttctgcagaaatcggcagaagcgctcggcggcgaacttggagtcagccgtccggcggccatgaatgcatgggctccgatgaacaggttgattggtgtgtcaggggcaatgcttaagccggacatctgcatcgcggcaggcgtatccggcgccgctgcattttacgcgggaatagagaagagcaagtttattgtagctattaatacggacgaacaggcgccgatcatgaagaaggccgatgtggcggtggcggatgattttgtcccggtaatgaaagcgttgcggaaacttgcagaaaagtaaacgacaggggacagttttatgagacaattgatatttccgatgaaagaacaatatgaagagtttttgatcgatgagtcaaagttttccggctttgcagacagcatttcttttccggaaagcgaagaagagatacaggaggtgctttgcaccgtgaacggggagcgcttacctgtaacgatccagggagggaaaaccggaattaccggcgcggcagtacctgaaggggggcatgtcatgaacctgtcccgtatgaataaggtaaaaagcagtgttcttcttaaagacgggacagggcggataaccgtagagcccggaatcaacctgatggacttaagcagggagatcgcggccgcattccgtaaaaatccgctgttctggccgccggacccgacggagacttccgccacggccggcggtatcgcggcgacaaacgcccagggtatcagccggctgttgtatgggcccgccagaacatatattgaatcactgagactggtgaaaagtgacggacaggtcattacggtggagaaagggcagaaaatgacgcttccttccggccgtgtgatcgaccggatagacgccgtacttggaaaagaaggcatcacaggtgttatgagcgagctgacgctgaagctgcttccaaagccggccggcatatgggggatcgcttttttcttcgggcagacaaaagaagccggacggtttgtggatattctgaggcagcatatgcctgagtgtgagaacgccgcggtcgccgcagtcgaatatatcgacaggacgtctatggatctgatcgaaaagcacaaaggagtcatgacgaagatcaaagagctcccggacatcagtgaagagacggaagggatggtatacgtagagctccacggtgaggaagatgagatcgagctgctggcagagtcgctcatggagactgccatggtgtgcggcagcgatccggatgaagcgtgggctgtctccggtgagacggatgtggagaagctccgcgcgttccggcacggggcggcagagacggccaatctttatatagaagaagtccgccggaacgacgagcgcatcaccaagcttggaacagacatggtcatttccgacatgtttctttcggatacgctctgcaatatgacagaggaactgaagcaggccgggctgaaagcaagtattttcggccatgccctggagaaccatcttcatgtgaatatactgcccgatgatcatgacgactatgaaaaggggatcgcgctcataagaaagtgggcggcgcaagtgagggaacgtcacggacaggtgaccggggaacacggcatcggaaagctgaagctccggatactggacggacttctttccaagccgtatatcgagctctgcacagaactgaaggaagaactggatgccggctttgtatggaacagagggaatattataggcggaaaggcagggggcgtatgagaatcgctgtatgtatgaaacaggtgcccgccgcttctgagggaaatatggacccggagacgggcgtacttatccggaccggcctggaggccattgtaaatgtgtatgatctggcggccctggaggccgcccttcagttgaaggagacatatggagcacagatccatgtgtttaccatggggccggcaaaagcggagcatgtgctgcgggaggcgtttgccatgggggcggatgaaggatatcttatctgtgacagggcatttgcaggggcggatgtgctcgccacatcctatacgcttaagcaggcgatcggctctgtcggaaggtatgacctgatcctgtgcggaaagcagacgacagacggagatactgcacaggtgagcggcgccctggcaaaatggatggacattctgcatgtgagctgggtgacagaaatatcagaaatatcacaaaataccgttaagatttgttataatatggataatcgggttatatcggcacaggcagagctgccgtgcctcctgtctgttgaaaaggatgcgtttgttccgagaatgccctctctgaagcttaagatcagcgggagaaaaaaggaaatacatatgctggatatgacatcttttgaggaccgaaatgaagaaaactatggtttaaaaggctctgccacaagagtccgcaggatctttccgccggagcgcacgaagaggcaggaacttgtgaacgtaagcaaagagaaagcggcagagtatatatggaatatactgaatacggatgtacaggaggagcgggtatgaggcaggcagatacagcagcgtggtccggaattctcgtatatctggaatgcaggcggggaaaactgcatcccgtagggcgggagctcattgcagaggcggcgcggctttcggcaaagcttggaggcaaagtgtacgcggcggctcttggatgcggtctggaagatgttcccaaacagctcgcggactgtgctttggataaaatttatctatatgagacagaagaggagtacagccctgttttatatgaaaagataatgacagaatgtatatatgacataaaaccatctgttgtacttatcggcggaacttatgagggacgcgctctggcgccgcgtcttgcggttgcctttgggagcggacttacggcggactgtacagcgcttgacatagacgaagaggacaaccttgtacagatcaggcctgcctttgggggcaatgtgatggccagcattgtgacacagtttacgaggccgcagtttgcgacagtaaggcccggcattatggaggcgttctttggggaaaaccccggcagggcagagatcgtaaggaagacagtgctgccggcggacgattcgttccggatcctggatgtacaggagagggaggcttccggggggataacggacgcgcgtgtactcgttgtggcaggcagaggtgtgaagaagaaagaagaccttgcgatgcttcgggaacttgccgggctgctcggtgggcagctggcttcaagccgcgcgcttgttgagaaagggtggatgccgcctgagaggcagataggactttcgggaagcacagtgagtcctgactacatgatcacgtgcggtgtatccggcacggtccagtttatggcaggcatgagacacacaaagaatattattgcggtcaatacagatcccgacgccaggatatttgagattgcccattatccggtgtgcggggacttgtatgagatagtgccggagctgatcaagaggctcggggccgggaaaggtgatggttctcctgagattcatttataaattagaacaaaaagagatcgaagaagcgcttctcgatctgaactggcgcagagaaggacggtttcggaccgtcaatctctgggtattgagtatcctcggtgttctcgtattaacagcatatatgaaggatccgggacagttttttctgtttctgcttctgctgctcattatactgctgctgttttatatggcatacggcgctgtgtacagcagaaggagacgggcgggaaagatggcggcccggggcggggaataccggctggagatcacagaatcatgtataatagcgggggataaaaatgagaagataaagctgtccggtaagaagcttaagtttctctgttcagagcatgtgatcgtcatccgtgcggaccgggacgtatttacggttccgagacgcatagtgagtgaggaagagttcggggaactgaagaaaattgcagcgaaatatgggtgcggctttataaatatagtaataagaaaggagtgactgtatggaggcggaagtaagagagaaaacagtgaagctgtcattgagaaaaggggtgttcttcccgccgtggcttcttcttgtggcgatggtcgtcgtaagccttacaaacggcgatgcgtttatggcggggcttaatgctgtgaccaactggatactgggcaactttgcgtgggcgttcaatctgaccacggtcggctgcgtgataacagtgatcatggtatatttttctccgcttgggaaggtgcggatcgggggaagtaaagcaaaaccgatgatgaagtttctcgatctcgtatggatcacactctgtacgacgatcgcggctggtatcctgttctgggcctgcgcagagccgctgtatcatatgaacgctccggctgtggcggaaggagtggaggcaggaaccgcaagttctgcgctttttgccatgaagacgatgttccttgaatggacgtggtctccatatgcaatttataccgtggccacattgatatttgcttttgtattttacaatatgaaccagtcctattcgatgggctccgcccttgtgccggtatttggggagaaggtaaagaggtataacggagttgtggatgtcatctgtctgttcgcccttgtggccggaatggcggcgtcgctcggaacaggtacgatgacgataggcggcggtgtggaaaaggtgttcgggtttgagagcggcccggtatcgtgggggatcatcattgcggtcatcgttacgacatttatcatatcgagtgtttccggaatcatgaaaggaatccgtctgctttcctccatcaatgccaaagtatatatggttctgcttttgtttctgtttgtatttgggccgacggcatttatgctgaatttttcagcggagtcctggggagcatatatacaggacttcttcaggatgagtcttatgacgggcgacatcttccaggacggctgggcgaagagctggcctatattctactggtgcaactggcttgcgtggacaccgatcacagcagtgttcctcggaaagatactgagaggttatacgataaaagatgccatcaagtgcaattttattataccggcagtcttcagcacaatatggatggggctgtttgcaactgcctctatctactatgagatgaacggcgccgggctgtatgacacgctgttaaataaaggaacagagtctgttgtatatgcagtgtttgaccagctgccgctggcggtgatcgttatcccgttctatctgtttattgtgttcatctcctttgtcacggcatcggattccaatacgaacgccatggcaggactatgcacgaacggtatcactcaggacgagcaggaatctccttcctggcttaagatcgtctggggaatctccattgcactcatgacgtggcttctgatcagcttcgcggggatcgacgggatcaaggcagcgtccaatctcggcggttttccgaatatgttccttgtcatcatcatgataataggactgtggaagataagccggaatccgcagaagtatgatgtgcacaaggaagattatgacagcaaggggcgtcctattgtgaccccgcggctgccgattgaaaaggagtaaatgattatgtctttgacgaaagaatattttatggaagcgacggaggcctgcccggtcattccggccatcaaaaatgaggagtggctggagggctgcagggaatcggagtgcggtatcgtctatatcatctacggggacatctgtacgatcgcggatatcgttcagagagtgaaagagatggggaagaaggcgatcgttcacgtagatctgatcgtaggtctgtcttcaaaagagatcagtgtagattttattcagaagtatacggaggcagacggcattatcagcatgaagccgggacttatcaagcgcgcaaacgagctgggcatgtttacgatacagagattctatatgatggatgcgctcacgtatgccaatatcgtcaagcatgtgaagaactgcaatccggatgtggttgagtttcttccggcaggactgccgaaggtcatacaatatcttttggaagagatcgataagccggtggtggcaagcggactcattctggacaaagaagatgtgatgggagcgctcaaagccggcgcatttgcggtatccaccacgaaccggaagatgtgggactgttaggagtgaggagaacaagatgagagcagataaagaatgttatgcgtgctgcctgaaaaaggcagagagccttcttttgcagtatcaggtgccgcagagcacctcggcaggcgtgctcgcgcatataaaggagcagcttgcctgcgcggacccggatacttcagcgcctgtgctcatggcccgggccatgagcctgctgggggaacagaccggaatcacggacgcctttgacctgccgaagaagaagtacaatgaactgctgcttcagcgggaagaagaggtatatgatgaggtgatgagggagaaagaccgcttttttgcggcccttcagtatgctgtcaccgggaattacatagactttggggccatgtcggatgtggaggaagaaaagctcaaagagctcctgtccgaccgtccgcaggtgaagcttgacatggaggaggcgtccaggctttcagaggatctgtccagagctttaagactcgtatatattaccgacaacgcaggagagatcgtgctggacaaagtatttctgcgtgtgataaaggagctgtatccgaagctgcaggtgacggtacttgtgcggggagtgccggtgttaaatgatgcgacgtcagaagacgccgcgctggccgggatggacaagatcgccgccgtcataccgaacgggacagacataccgggaacgcccattgacgctatcagccgtgaggcgagagcagcggtggacgctgcagacctctgtatcgccaaggggcaggggaattttgagacgctgcggggctgcggaagaaatgtatactatctgtttctatgcaaatgcgagttgttcgtcaggaagtttcaggtggagcggtttactccggtgctgagtaatgagaagagaattatacaatatgcataaaaacgagagggcacttttaagtataatcacgatattgacaaatgatatgacacgatttacaatggacatagttactaaaagagcggaagagagagtaacttttacctgcgtgcagtgggtggaggttgctctttttttgtctgcgggaagactgtttcccgtccggcattccggtcctgttgtgcgcagacagaggcggcgggctcttttgcaataatgatcaaataacatatggaggtattaaaatgagcttaaatatcaatgatttttctatggatttcttttcactgaaaggtaaaaacgcaatcgttacaggtggaaacagcgggctgggccaggcgtttgcgcttgcgctcgcaaaagcaggagccaacattttcgcatttgcgtttgtagatgacgacgggacaacacagaagctgatcgaagactgtggtgtgaagtatacatttatgcagggagacttgactgaagacgggatgtgtgacaaggttgccgagaaatgtgctgaagtatacggcagcattgatattctcgtaaactgtgccggaatctgcaagatagcagatgtacttgactttggcagagcagagtgggatccgatgatcgctatcaatctgacgggcgcttttgacttaagccacgcagtcgcaaaatatatgattccgcagaagagcggtaagatcatcaatatctgctccctgttctccttcctcggcggacttggctctcctgcgtacgcggccatgaaggcaggtctcatgggacttacgaaagcatatgccgatgagctcggaaaatacggcatatctgtaaatggtattgcgcctggatatttccagactgccatgacttcaggaacaggcagcgcaaacgatgaaaaatacaacaagatcaaagaccacattccggctgaccgctggggagagagacaggatcttatgggtgccaccgtattccttgcaagccaggcgtccaattacgtgaacggaacggtattagttgtggacggaggctaccttgtaaggtaacagcttatttacagaaaacttagacaaagaaagaggtttggaccaatgagtgagaaatatatcatcggagtagatgaaggttcccagagtgccaagatacttatcttcgacacaaagggcaatatcgtatgtgagggaaaacatcctctgaagccttacaacctgccggagccgggacttgtagaacacccggacgacgactggtgggacgccatctgcgaggcggctaagaaatgtatggccagctttaaaggaaacatagaagacattgtgggaatcggcctctgtacgatccgttactgccgtgcctatctcaaggcggacggaacacttgcgcagcctgcattaagctggatggacgtacgtgttgcgcagccttatgaacatacgaacccggatgtgaaatacatcgttgcgtcttcaggctacataaccaaccgcctgacgggggaattcaaggatacggttgccaattacgaaggcgtatggccgatcgatgtggacaaatgggactggtcggatgacccggcagcttatgagtcgacagggatgccaagagagatgctttttgaccttgtgatgccgggggatgtgctcggatatgtgacgaaagaagcagctgaggcgacaggatttccgcaggggcttccggtcgtggcgacatccaacgacaaggcggtggaaggacttgggacgggatgcatgggggatacgaccgcatgtatttctcttggcacatacacggctgccatgatggaaggaaaagaattcctcagagatacgaagtatgtatggccgaaattctcctgcgtgccggacaaatacctctatgacagcaacgggatccgaagagggatgtggacgatcagctggttcagagatattctcggggacagctatgtgcaggctgcgaaagaaaagggactctctgcggaagaacttctgagcgaagaggcggagaaagtgccggcaggttctgacgggcttatgactgtgctggattggctggctccggtagatgcaatgtacaaaaagggcatcatgatcggttttgacggaagacacacgagagggcatatataccgctctattcttgaggcggtggctctgacgatgaagaaacatctggacgacatgaccggggagatgggcgtgaagcttgacagagtcatcatcaccggaggcggatccaacagcggcctgttcatgcagatctttgcagacgtgttcaatattccggcagtgcgcaatgaagtgaacggcgctgcaggcctcggcgcggcgatctgcgccgcagtggcggcaggcgtctacggaagctttgacgaggcagtggacaatatggtaaggatcaaagacagctttgagccggatgcggagcatgtggaattctacgcaaagatgctcccgatctatacggatataacaaatcacacagatgatatattaaagaaatcgtatgaactatttcattgattttgaaaggggtcagacccccttggccatgggggccggacccctgtggagattccaagggggtccggccccttttgcgaggtgaagcgtatgaaaagaccacttattttaattacaaatgatgacgggattcattctcccggcctgagggcagcggccgaagcggcagcggacatggcggatatcgtgatcgcggcgccccacacacagcagacggggatgggacgggcatttccggatacggaagatatgggagtgatcgagacggaatctatggacatacacggccgtacggtccgggcgtacggcgtccacggttctccggctcttgcggcggctcacggcatactggagctggcaggccgcaggccggacctctgtgtcagcggaatcaattacggggagaacatgggcgcggtgctgacctgcagcggaacgctcggagccgcgtttgaggcggtcagccataacgtgcctgcaatagcggtgtcgctggaaacagaccttaagatacagcggtccaatgattttcaggcggccgatttcggcccggccgcagaagtgctgcgcacatggaccgcccgcgttttggaaaagggcatgccggagaatgtagatatccttaacatcaatgtgccggcaaagccccgaagtccgggggaataccgtatcacgacccagagccgtcagaattacattgaatttatccggcccgggaagcgggaactggaccggccgttttcaatgaagtcccgactctatgtcgatgaagagacgctggagagggagagtgacatctatgcggtgtatgtggataaagtggcttcggttactcctctaaatatcgtgatgtcggtagagatgataccttgatcaatgtcaaagtacagaaaacctaataccgtatgagtgatatcttgtataattgcctttatttccataatattccggaaaacaatttgtccaaagtctaataccgtataatttccgcctccgctgaaccgctatataattatcttatactagtgtttatttacctaaatggagggagagatgataggaatgcggaggataaaagggaagattacggcatttatggcggtacttgtcatggtttcgttgcttgtatcgctgccggggccggtgtcatatgcagcgcctgagaatacagaagacaaagaagcgcaggccgcttcagaaagcagtaacgcagcagcggcagacaaccgccacgatgcagtgtctcaggaggcgtacaaggaatttggccttccggcagggacgatagaggaatatacatcagacgagcatccgcttgagaattatgagcctgcgccaaagtcttggctgtatatgagctatatgaacaagacgagtaagaacaaaggacagtttgcggttctggacaccatgaaggcgctgacggaaaaaaatgccacgctgaccgataagaatcagaaggtgaccggtaatctggacgcgagtccgatcgtaccatatacagataatgccgcggcctcaggaagcggcagcaggatcgtcgggaaaaacgcggtggcgctggcggatggaatgaacgacagtaccatcgtggagatgaacctgtactaccgcgagaccgggaccttctccaagacctatgagagcggcttcttcttccagacgatgaagcggcagaagaatggagcttaccttccgcacacaagccagaactatgatataaaagggggcacagcatttaaaaaactgggctcccgggctgccgccgcgctcaccgccatgactgcggtggatctggacggtgacggggtggacgagcttgcggtctatactccgtattttacagggccaagcattaccatctttaaacagaaaagtgaaagagaccgcatgactcttgaaaaaatcggagagataccgctgaaggatctgaataccgattccgatgcgtggcagtttgatcagggatacggcggggagaattttccggttgtcggactttctacatcttcactcgccggggcaaaagaacatctgatcatcaccgcatgctgtcctgccagtgtggcgaaccacagtaatgtctctgctctggctatctacagtatggacggaggtactctgaaaaaagagtatacagccgatatggaatttgtggagctgataaagggcatacctactccatatgtctatcggtatgcgtctgcggttcaggcggacgtagatggagacgggcaggacgagatcgtcctggccggatataacaatggccgcgacggttattatctcaatatgctcacctacgataaggggaaatacaagaaggtaaacaatactgcatttaaaatcagtgtatctggtgatacgagtgatatcactgccagacagcagttcggcatgagtgaggctgtgacacttcaggccgcgaagctaaacgagaaggatgattcggattatatcttccttgccggccacgtgttaaaatttaagcagggggatacaggggattcactggaggacggagaatttgacgtcgtcaagtccatggatctaagtgccaataagtggggagactttcattttgtcagcagtgcggccgtgggccgttttgcaaaggataaaggcggcagcgagcagatcgccgtggtatggcagagctattccaagaaggacgatgtgacgatgaacatttcctggctgtgggcagacggaacttcggtaaagcagtataacacgaatgagaagtacttgtatgagcggggagccctcggctatggcagcagtatcatactctgtccggtcagcgatgtaaacagcgctgcctattatcaatatgagggaaaagactttggctggagcgccccccaggctcttgcagccataccggccatgccgtactggggcgaactgggcgcaggcggtaccccgaccgtatccttcagtgtatccagagaacggacgacaggagcccggggggatgtgagcctgcagggcgggtttatggccgggtttgacgcggctgccggagcaggcctggtaggaaacgggcttgcagggggagccggatttgacctggagggtctgatcggactggcttacgagttttctaaaacccatacaaagggacaggaacggacgataacggcagatgccgggcgggacagcgctgtcatactatccataccgatcgtgacgtatcattataaaagatacctgcccgaatcaaaggtgacccagcaggcgctggataagatcataaaagagacaggcgtggctccctattatgaaaatgacccgtccaggctcataaaggcaggggatgtgataccggcaggctggtacagcgcggatacggtcattcagtttgatgaagtatacagcagtatgtatgtggacgattataacaagttatgtgacaaatacagcacagcatccatcccaatcgagaagatcgatatgagtgaactgtacagcccggattaccgcaaaggcgatccatctacgtatccgtcgaaaaaggaggagatcaagtccatcggcagcaagtcgtctgtcgtgggcccgatggcagtaaagagcaacgggggaacggtggagatggcctttacacaggagagtgcgctgacttcggacttcgccttccatttgtcggtggatggggatatatacggacaggcaaagggtaagttctgcctctttgcaaatattgaagtggagggaaaatttggagctgcaggcgtttttgaccttcaggccggaaatgtcagcgtcacgacaaagggagaagggataaaagcacagcttgcgggaccgcccacagaaaagaatttctactcctatgaggccagccttgtggcatggaacgcggcgtggggcaaggataagaaggatacattactcatggtaggacctcttgctgacgcaaggaaagatatccccctgcccccggagaatccttacgtgtatgaagccgggacggatatggcgctgcttggctgggataattcggctgacaacggactgcgtcaggcagagaagtaccgggtctatcaggacactgggggcagtcacaaaacgttggttggagaggccgacaggaaagagaatctttttgtcgtctcaggactgaccccgggtaaggaatacacattttacttcaccggtgtgggcgcagcgccggattcactggagagcgagtacagtgtgcccctgaaggttacgacaaagtctgctgacagccagatacacataccggcagatcaaccggaggatgcctatgtgaaggtgggagaacgtgcagtattttctgtacagaatctgacgccgcctgagggttacgaactgtgttatcagtggtacgaatatataccggatgcagacaagcatatgggagaatggcaaaagaaagagaaccagacatcggatacactgacaatagacaatgtcacggcagagatggataacaacaagtaccggctggaggtacagctgcgtaagaaggtgtccataggaaatgcagttacagaagaaacggtatattccagagcggcctcactgtacataggagatgacagccggccgtcctgcgagatcacgggcctgacacgggacaaaggtggaacggatgaaagagaactcaagcctctgaagggaacctattacatcgcggccggtcagatggacaagccggtgagtatagaagcatctgtaaaagaaaaaggcggcggtgcggtcacgtccggcacggtcacgttcatgtaccgcaaggacggcggcacacctcagccactggaagcccctctgtcccttgatggttcgggaattgccggcacgatctggacgccttcggaagaagggcgctatgagtttgcggcagtatacgagtctgacggggggacgcagcttgtcatgtctgctccttccgttgtaagtgtgggaaacttaaaggacagtttttatcttgtccggtatgtgacagacggcgggacgaaaccaccggagaatccatacggcatcagcagaactgccggcagtatcccgcttgcggatgtatcaagagattattatatattccagggatggtatacgaaagcttcgggcgaagggacgaaaatcgaggagcttaacccggaacagatcgcccgggagctcgacggaaacggtattgtctatacgctttacgcttactggaaaccgattcagtactctattgtttatgaacatggacatgtcacaggtacggtccagaatccgaatcctgattcttacacgatacagcagtattatgatttaaaggatccggttctgccggggtatgaattcaagggatggtataaggaagcgtcatacattacgaaggtctcttctctgccgcttggcggtgagtcaaaggatgctgtgggcagcagtactagcagtactctttatgcaaaatgggaggaacaggaatatccgatccgatatattctaaatggatttcctcttctgacaggaccggatacgtataaggttacagacctgccgcttgacctgccaaatccggaagagccggaggcggagaggtggaggatgaaccaaaatgtccctgttaacaatgggtatcagggagagaaaaggtacgtatataaggaatggaaggatacgcaaggcaatactataactgccatcccggagggaacgacaggcgaatttattgtggaagcaggctatgagagggagtttaccgctgtgtatctaaacgagatgggcgggaaaatgaagtcgggatggtatcatatatactatctgcacgcttccagtagcagcctgacaacaccagccaaagacgatatacataaaaaaggttttatatttgatggatggtatgggaaatatgacagtacaacaggagaatataaagataaacgtgagctcatgtcttatgatgaaaatgcaaataatgtaatgctctacgcaaagtgggtggatgacccgaaccaggtgatcgtaaaatatcatctgaattatgggggaagtacggactattatctgccggcggacacctataccgtgaagggggatacggttgacagaccagatgacccggagagagacggctatacatttacggggtggtatctggacaaggcatgcacgacagagtgggattttggtgataaggtgccggatgattatgaaaatgggacacttgtactttacgccggatgggagaagaacaaggggtcagatgacacgccgggaggcggcactgttactccggggaataacggcgcgcgcccgggagcccatacaggcggcaagaacggcggcgcagggcaggccggggcccgtaccggtgatacagcgcttccggtaatgtggggcggaatcattatgatttcggccgtggtcctctttatcatactgaggagaagaaaacaggacaaatgattgtccgcggcagagggccgggtattctgtgaaaatgcagaattccggcccttttctatttgtgctgtgatatggtaaaataggagcaggtatttcacagaaatatcataaacgtctgatatgatgaaatataagaatgatatactgcggaggtatgttagatggacaaggtcaaaatattagtggtagatgatgagagcagaatgcgcaagcttgtgcgggattttctcggacgggaagggtatactgttctggaggcaggagacggcatggaggctatggagatcttctatgaggataaggagatcgctctcgttattctggatgtcatgatgccgaagatggacggatggcaggtgtgcagagagatccgccagtcctcgcagacacctgtgatcatgctgacagccaggtcagaagagcgggatgagcttcagggatttgaactcggcgtggatgaatacatatccaagccgttcagcccgaagatcctcgtggcaagagtggaggcgatcctgcggcgttctcacgtgctcggcgcagaggagataattgatgcgggagggatccagatcaacaaggcggctcacgaggtgaaggcagaaggaaaacagatagacttaagctacaaagaatttgagctgctcgtatactttgtggagaacgaggggatcgccctgtccagggaaaagatactcaacaatgtgtggaattatgactattttggggatgcgcgtacgatagacacccatgtaaagaagcttaggaacaagctgggagacaaggggaattacattaagaccatctgggggatgggttataaatttgaggtagaagaatagatgaaacgttcgatcaagaagcagatgacggcggtgtttgtgggcctgacggtctgtctgctgtttgcgctcatagtgctcaatatacggttcctggaaccgtattacatcagtaataaagaatcggaatttgtcaatatgtatgagaagcttgccgagtcggtctacagcggtacatggaagagcgaggatacgcagacagaactcagacatatggcggagaagggcaatctctcataccttcttatgaatgtggagacaaaggaaggtatatttaacgtgccggatatcgacatgctcaatgaccagctgaccgggtatctgctcggacaggcacagaaggagagcaaggtgctggaaagcgccagagactatcagatcgcacagtataaagatccgaggacgcagacggagtacatcgtcctctggggcgccattgacggaacttataatacgtttctcaggagtccccttgagagtattaaggaaagcgtggctgtttccaaccgttttctcctgtatatcggaggggccgtgacctgtatctgcatctgccttgtctggtatttttcaaagcgtctgacagatccgatcaaggaactggcgcttttgtcggataagatggcggatctggattttaacgccaagtataaaagcggaggggaaaatgaaataggagagctgggcgccaactttaaccggatgtccgagaagcttgaaagtacgatctcagagctgaaaagcgccaacaacagtctgcagaaagatatcgagcgcaaagagaagctggaacagatgcgcagcgattttctcgggaatgtctcacacgagcttaagacgccgatcgccctcatccaggggtatgccgaagggctgaaggaaggggtcagcgacgacgcggagagccgggaattctactgtgatgtcatcatggatgaggcggggaaaatgaatcagatggtgcgcaatcttctgactttaaatcagctggaattcggagacgaggacatacagtttgagaggttcgacgtcacggagcttatacagggagtgctccagagcatggagatcatggcccagcagaaagaggcaagggtaaatttcattcaggaagcgccggtctacgtgtgggcggatgaactgaaagtagagcaggtcgtaagaaattatgtgagcaatgcgtttcatcatctggacggcgataacgttgtggaggtaaagatcacggtcacggatgagaaagccaggatcagcgtgttcaatacaggcgcgcccatcccgcaggaagatattgcgcacatatgggacaagttttataaggtggataaagcgcatacgagagaatacgggggcaatgggatcggcctgtccatcgtgaaagccatcatggaatcctttcatcagaaatacgggctcaataattatgacaatggagtggaattctggtttgaactggacgtcaaataatggtacactatatcctataaagaaaggatgggagttaccgtgatcgcgattattgattatgatgcaggaaatataaaaagtgtggaaaaagccatgtcacttctcggacaggaggctgtcgttacgagagacaaggagacgatcctgtctgcggacaaagtaatacttccgggcgtcggttcttttggcgacgctatgggaaagatcaggcagtacggacttgagccggtcatccggcaggtggccgggagcgggacgccttttctcgggatctgtctcggccttcagcttttgtttgaagaaagcggcgagagcccgggcgtgccgggtcttggcattctggagggtaagatcgtgcggatcccggagtctgaagggcggaaggtgccgcatatgggctggaattctcttgaattcccggtgatgggaagactgtttcgcggactttcgggggagccgtacgtatattttgtacactcttactatctggaggccgcggatgaacagatcgtgaccgctgtgacagagtatggggtaaggatccacgcttccgtagagcagggcaatgtatttgcctgccagttccatccggagaaaagcagtgacacagggatccatatcttaaaaaattttgtggaattataggcggaggatacatatgcatacgaagaggatcattccatgtctggatgtaaataacgggagagtcgtcaaaggggtaaactttgtggacctgagagatgcgggcgacccggtggagatcgcaaaggcatacgacgccgccggagcagacgagctggtgtttctggacattacagcctcgtctgacgcgcgcagtacagtggtcgatatggtgcgcaaggtggctgagacggtgttcataccttttaccgtaggcggaggcatacgcacggtggaggatttcaaggcgctgctgcgggaaggggcagataagatatcgatcaattcttcagccatcaacacaccggaccttatatcggaggcggccggaaagttcggaagccagtgcgtcgtggtggcgatagatgcaaggaagagagcggacggaagcggctggaatatctataagaacggcggccggatcgatgtcgggatcgatgcgcttaagtgggcggcgcgtgtggaagagcttggggcaggagagatccttctgacgagtatggactgcgacggtacaaagggcggttacgatctggaacttacccgggctgtggcggatgccgtatccatacctgtcattgcctctggcggcgcggggacgctggaagactttcacagggcgctgacggagggaaaggcagacgccgcgctggcagcatctctgttccactacaaagagctggagatcagggaagtaaaagaatatctgaaggaaaaaggagtctctgtccgtctgtagcatttggatatcagaagaaaaagaaatacgatcagataaaatgataagaaaatgaggtggcataacaatggcagcaattaataatgactggctggaagcgctcaggggagagtttaagaaaccttattacaaagaactgtttcagaaggtgaacgaggagtataagacgagacttatatttccgcctgcggatgacgtgttcaatgcattccaccttacgcctcttaaggacgtgaaggtagtcatactcggtcaggacccgtaccacaacaacgggcaggcgcatggcctgtgcttttcagtaaaaaaaggggttgaggtgccgccgtcacttgtgaatatataccaggagctgcacgatgatctgggatgtacgattccgaaccacggttgtcttacgaaatgggcaaagcagggagtgcttcttttgaataccgtgctgactgtgcgggcgcaccaggccaactcccacagggggatcggctgggaggagttcacggacgccgcgatcgcggcgctcaatgcccaggaccggccgatcgtattcatattgtggggaggaccggcccagcggaaaaaagcaatgctgaacaatccgaagcatctcatactcgagtcgccgcacccgagcccgctggctgcataccggggattcttcggcagcaggccgtttagcaggacaaatgaatttctgaaagaaaacgggctggagcctatagactggcagattgaataggaggaggcagcagaagggggatacatatggaacaacaatttgacttattgataatcggggccgggccgggaggctatgtagctgcaaagaaggcggcaaagcttggaatgtctgtggctgtgatcgacaagggcgaactggggggcacgtgcatcaaccgcggctgtatcccgacaaaagcgctcatacatgcggcctctttataccgtgaaatgcgggaatgtgaacggttcgggctgtctgccggcgaggtcggttttgaccttcagaagatctatgagtataaagatctgtctgcggcggagatgagagcggagctcggccgggaatttgacggcgccgggatccgttttatccagggaaaagctgtgattcaaagtgaccgcagagtgcgcgttgtatcagatgaaaatgatactgcatactataaaggaaagtacattctgatagctacaggcgccagggcaaatatggttgatctgccgggcatggatcttccgggtgtcatgacgagcgaagaactgctgacagccaatgaaagccagtatgagaaactgctcatactcggcggcggtgtgatcggactggagcttgcaactgtattcaacgcgcttggtacagaggtgactgtggtggaagtatccgaccggcttcttccgaacatggaccgggaattttcggatgtgcttgaagagatattggggcacagaggtatccacatttacaaggaaagcatcctggagagagtggagaaacggggagataacatcagctgccagtttgtgtgcgggggcagcaaccgggaagtggaggtaaacgcacttctcgtctccgtagggcgcagcgcaaacacagaaggactgtttgatccggatgtgtcggtgaagacagataaagggaagatcgtagtagacgatttctacatgacgagtatgccggatgtctatgcggtgggggatgtcatcggagggatccagcttgcccatgtggcctccgcccaggcgacctatgtcgtggagcggatgaacggggttcagccgtcggttatcattgagatggtgccgagctgtctctttactcctatttccatcgtgccgagctgtctgtacacggacccggagatcgcgtctgtcggaataacggaagaagaggcgaggaaaaagggcgtgccggtgcggtgcggaaagtacactatgagtgtgaacggacaggcgatcatctcaaaagaggagaagggatttatcaaggttctctttgcggcggacagcgacgtgctccttggggcgcaggtcatgtgtccccgggcgacagatatgataggcgagctggcgacggcgatcgccaacgggctcacttcgacccagcttatgtatgccatgcgcgcgcatcctacatttaacgaggcgatctcctgtgcggtggaaaacagcagggaaagtgaaagccggtggtagaaattcgctctttttcttgcgttcaggagaatcaagagcgtataatatttacagaagctaaaggtaaaaagggaaatggagggccagttatggaattaaaacagacgaggacgcttatggatgtgcgcagagggtttttaatgacagtcctcagcgtgagtgttgtagccatacttatagcgggcatagtttcaaattacttcttttacagtattccgatatttacaatatgcgtatttgccatatttatcgttatgctgtcgattttttacgatatatatatcaactccacatatcgcatctttctagtggacggcgacgtatatatctattatccgacgtacagctcaagagccgggaatgaatttatcttctaccgggtgaaggaagtggattactcaaccgtaaagggcagttccattttgttcagcggtacggtggaggtcaggacagaaggcgttgagcgggaagggatgaaagaagttgcggacccggaagcgctgttcaaagatgtattctcgggagagacgtataatatccagaaaagattccgtatctccagaatttttgaaaatgagaatgaactcatgggactgctggcggagaagcggaagaaataagcagggtggacgtataaacaggcgggcgcgcgaagatgcgcccgcctgttctgtctgttctgcccggggatcatgattttctcaagctggtactggcggtggctggcaggaaggggagagatttagcagcccatgtatgaaaaccagaatcttctattgacatttttgaaaaagtatgattatattagagtataacatatgaatggttgttcatatgttcataaaaacaattgatataattttaaatgttcaggaggattagttatgttagcagctgagagaaaagcatttgatgaatgcgggtgcggccatgggctacacgggcatgacgggcagaatgagcacgatcatgaccgcggccacgggcacacaggggaatgtcatgaacatcacgaacatatagacgaagcacataaccatatcggtcatagctacgcacatgaatgtggcggtcaagaccacgccggccatgaccatggcggccatcagcatgacggcagctgcggctgcggccatgaggaggcgcacacaggacaggagttcgcacaggtgagcgcgggtgttccgcagaaagtatatattctggagaacctgagctgcgcgaactgcgcggcgaagatggaggagcagatacgtaagatgccggaagtagagatggcgacgatcacctatgcgacgaaacagcttaaggtggctgccagagaacaggaaaaactgcttcccacattccgggaaatatgccgctccattgaaagtgaagtgactgtgaccccgagagatgagatacagagtcagccgaagcaggagcgttctggattttttgcggagaacagagccgatgttcttgcgatcgcagggggagccgtcctgtttgtcgcaggcgaggtgctggaacggacggcggcggacccggtgatcgcctcggccgcgtttatcgtggcttatatactgctcggatgggagatcgtatttacggcggtgaaaaatctttccaaaggccatgtgtttgatgaaaactttcttatgagtgtggctacactggcagcgtttgccatcggggactttgccgaggcagtcggagtcatgctgttttaccgcgtcggagaactgtttgaacatatagcggtggaacgaagccgttctcagataatggatgcggtggatctaagaccggaagttgtcaatcttgtgcgcggggaagcagtcgacgtgataccggctgaggcggccgaagccggggatcttatcctcgtgcggccgggcgaccggataccgcttgatggcaaggtagaagaaggcgagagccgtattgatacctctccggtgacgggggagcctgtaccggtcagtgttaagccggggatggatgtcgtctcagggtgcgtaaatgaacagggtgtgctgaagataagggttgaaaaaccgctgagtgaatctatggtgacaaggatcctggattcggtggagaacgcggcggccagcaagccgaagatcgaccgttttatcaccagattcgcgagagtgtacactccgatcgtagttgcggtggccgcggctacggcggtcataccgtcgcttgtgacaggtgattggaatcactggatatatacggcgatcacttttctcgtgatcagctgtccatgcgcgcttgtgctcagtgtgccgcttgcgttcttctcgggtatcggcgccggttcacggcgggggatcctgtttaaaggcggcgtggccatcgaggcgctcaaaagtgtgaaagccgtagtcatggataagacagggacgataacaaaaggtaatttcgaggtacagcaggcgacggcgacgggacgttttacagagaaacaggtgctcaacattgcggccgactgtgagctggattcttcccatcccatcgggaacagtattgtgaaggcggccagagagatgaagcttgcgctggtgaggccaaagagatcagaagagatatccggaaaaggcgtgcgcgccctattccctgaaggagaagtgctctgcggaaataaggcgctgctggaaatgcacggtgtagacacatccgcgtaccataataaaggctatggcacagaagttctcgtcgccgtagacggggagctggcaggatggctcgtcatagcagacgtcatcaaagaggaggcaaaagaggctgtcggcatgctgaaagcaaggaatctcgtcacggctatgctgaccggagatgcaaaagacagcgcaaaggctgtggcggcccggaccggaatcgatgaagtgcacgcacagcttcttccggaagaaaagctcgatcatctgagacagatacggaggaagcacggttctgtcatgtttgtcggcgacgggatcaacgatgcccccgttcttgccggcgcggacgtcggcgcggcgatgggaagcggcgcggacgcggctattgaggcggcggacgtggtatttatgacatcttccgtgacggccataccggagtctgtcgagatcgccaacgcaacaggaaaaatagcgatgcagaacgtagtattcgcccttgcgctgaaactgctgatcatgatccttggttttgcggggatggcaaatatgtggatggcagtgttcgcagatacaggggttgccatgctctgcgtgctgaattcgatccgcatattgtataaacgggcgtagcggttgaatacagaccttacaatgagtgaaacatattgaataggaaataatgacaccaagattacgaaaatgttaattttggtgtcattttagtaaaatggttgaaaagggatgtcctatgttgcataattaacaagtgaacggatattcatatgaaagggagatatcaatgaggaaaccagaagcggaatgttgtgaggtcacctgtatccacgatgatgtgatcagcagagtgagcagacagatgcctccgcaggagagaatgaaagaactggccgatttttataaagtatttgcagacgccacgagaatccgtatcttgtgtgtgcttctggagtctgagatgtgtgtctgcgacctggcggaagtgctccagatgacgcagtctgccatatcgcaccagctgcgcgtgttaaagcaggccaagcttgtgaaaaaccgcagggacggcaagacagtctattactcgctggccgacgggcatatacagacgatcatcagccagggaatggagcatattacggagtagacaacatatatatacaaaaaagggaagtagaatgaccaggcaattgaaacagagacttttaatatacggagcaggcgtgtttgtgtacgtgtgcgcagttgcggcaacgatacagtatacgctgtctgactgggtgaagttcataatgtttttaacggcatatcttgtggtaggatttgacgcgttccgccagcttgcggagcacctgatgaaaaaggagatattttcagagtatctgcttattatcctggcgacgacaggtgcgtttggcgtgcagagatatacggagggcgtacttgtcatgcttctgtttgaactcgggatgatgtttgaggcagtgtccacagacagcgccaggcgctctattgaacagatgatcgacatccggcctgagtatgccacaagaaaggtgcggggcaaagagacgagagtggaaccgtcggagctgaaactgagacatatcatcgtcgtcaagccgggggagaggattccggtggatgccgttgtcacagtggggacgtccacggtggatacaaaggcgctgaccggagaatatatgccccagacggtggagcccggggacgagatatacggaggatgcatcaacctgagcggtgtgatcgaagcgagggtaagccgcatttaccagaattccacagtatccaaggtgatggagatggtggaggaggcgcagaataataaggcggagagcgagacgtttgtcacgaagttttccagagtttatacgcctgtcatgatcgtgtgcgcactgttcatcatgatctatccgtcgctgactttttcctacggcaactgggatacatggatctaccggggactcatctttcttgtcgtggcatgtccgtgcggccttgtgctgtccgtaccgcttgcgtttctggcagggatcgcgtctgcggcccggcaggggatcgtagtaaaaggcggaaattatctggagtttctgtcaaaggcagatacatttatatttgacaaaacgggtacgttgacagaaggtgtctttaaggtcaaggagataaaggcagaaggcatgacggagaatgagcttctggagatggcggcccatgtagagagttattccaatcatccgatcgcaaagtcgctgctagcggcctatgagggaaagctggacagatcacgggtgcgaagagtcaaagaagcgccgggattcggcatcagcgccacctatgacggcaaacgtgtccacattggcaattaccggatgctggagaagcagaatatagaacacagcaggataaagaggacgggaaccgtgatttatctcgtggccgataagaagtatgcgggttacatagtcattgccgattcggtgaaagaagacgcgggcccgcttatgcagtacctgaaggaaaagtgcagggctgttctcgttatgctcaccggggacaatgaagcttccggcatggaagtggccgaggcgcttgacatggattacgcttatacagatttgatgccggaagataagctggagcagatagaggattttcttggtctgcaggacaagacggaaaaaatcgtgtgcgtcggagacggcatcaatgacgcgcccatactggcacgcgccgatgtggggatcgccatgggtgcgctcggctcagccgcggcgatcgaggcggctgatatagtgctgatggaagatgagcttatccggataaaagacgcgatccgcatctccaaggagacactcagagtagtcagccagaatatcgcattttcagtgggcatgaagattatcatactgctgctggcggcggtagggtatttcggcatgtgggaggccattctcgcagaacttggagttatgtttgcggcgattctgaatgcagtgtgggttgtaaaatatacggtgtaggaggaaatatgaagaaatatatggtcatcctgtccgccgcggcggtcagtgccgtgctgacaggatgtgttaagaactatgctgaagaaggagtaaaatacctggaaaagggaaaatataaagaagcggcagaacagtttgagaaagcggtcgaagcagaccggaatgtaggagacgccttccggggcatcggcatggccaagtgggaacaggaagattacgaaggagcccgcgatgcatttaaggaagcgcttgacaacggagctgaaaagacaggcgccatatacaatctgctcggcagctgtgagatgaagcttaatgatccgcagggcgccctcagctattaccggctggcgctctccgccgaagacagcagcgaggatcttctgaaggaagtaaaatacaacatgatagctgcctacgagcagtcaaaagactgggagagcgcaagggcaaagctgaaagaatacattgcagagtaccctgatgatgagacggccgggaaagaggccgaatttttagagacgagacagtgaggcgtatgatagatttaaaagaagaaaaagaacggatcattctggtcggcgtaagtgtgtcggatcaggacgatactgaaaagtcattggatgagcttgcggagctggctgccgccgccggcgcggagacggcggggcgcatcatccagagcagggagcaggcgcaccctgccacttatatcggaaaagggaagcttaaagagcttaaagacctcatctgggagacatatgcgacgggcattatttgtgacgatgagctgtcgccagcgcagatggggaatctccaggatgaacttgaagtgaaggtcatggaccggacacttgtgatcctggatatttttgcatccagggcgtccacgagcgaggggaagatacaggtggagcttgcacagctcaagtaccgccagtccaggctgacgggattcgggaaatctctgtccaggctcggcggcgggatcgggacaagaggtcccggcgagaagaagctggagatggaccggcggcttatcaaaggaaggatcgcccagctgaacagggaattaagggatgtaaagcgccaccgcgaggtgacgagagaacaaaggagcagaaaccaggtgccggtggccgctgttgtcggatatacgaatgcgggcaaatcgacgcttctcaatgcgctcacgggggcggatattctggcggaagataagctgtttgccacgctggatccgacaacccgggaactgaagcttccgagcaagcagagcgtgctcctcacggacacggtcggatttatcagaaagctgccgcatcacctcatagaagcattccgcagtacgctggaggaggcgaagtatgcggatatgatactgcatgtggtggatacggcaaatccacagatggacgagcagatgcatattgtatacgagacgcttcgcagcctcggcgtaaaagacaaaccggtcatcactgtattcaacaagcaggacaaagagggggcgcagcagaccgtgcgtgatttccaggcagactatacagtgcggatatcggcaaagacaacggaaggcctggatgaactgaaagagatgatagaggcagtgctgcgcgggcagaaggtgctcatcgagcagctctactcctacaaagaggcggcgaagatacagctcatccgtaagtacggagaactgaccgcagaagagtaccgggaggacggggtctttgtgagcgcatacgtaccggtatctatttatgataaggtgagaagtgtatctctcggtgattctttgaataatgccttgtaggcgcgctgaaaggtagagtaatccttatagccgcactcataggcagcctgggcggcggatgtgccggagaggataagttcccgtccgagcaggaggcgcttctgggagatataattgcctatcgtgcagccggtctcctgtttgaacaggcgcatcatataatatctgcttatgaagaaagtccctgcaatgccgtcgatcgttagttcatcggacaggtggctgcctatatattccagtatatcgatgatcttcggattacaggcgtccgtgtcaatgaattccagatggtctccctgggcggcgcggctcaggtggatcatgaattcgatgaagagcacctgccggtaaagagcggcggcatacgcgtcatcagagaaagaacgttccagccgggtgatggatctaaacagagaactcttttcaagagagggaatacgcaggacattagttcctgctttttctgcctttaaaaagcagcagttcaggtcgtagtcctctgtcttataggcattcatgaaattgggtgagatgtagacgatgatacgttcgtaaggaaaatgattgtccacgacgaggcggtggatatcattgtgttttacgagcacgatatcgtaaggcttcagttcataggattttccttcaattatataatttacgcggccgcggatcaggatggtgatcttatcgaattcatgataatggtattctatctctttcgtctccgtgtccgtcaggtgaaacagacggaattcgctgtttaagtatccccgtttttcatattgtcccatctttttactccttttgtaattattttagcggaatggggcattatttgcaatatagtaagcattatttgtattgaatttgaaaataatgcctgttatgatatacatataatgcagaccttgagtgatcagggatatatgaagacggtatgttatggaggtaacgaaaatgaaagttgttttggaaagataccatggactgggaaatgattatgtcgtgtttgacccgaataaaaatgagctgggccttacgccggagaacgtccgcatgatctgtgacagaaatgcgggacttggctccgacggagttctggaaggccccgtcatgaaggaggagggcatgtttgtaaaagtctggaatccggacggcagtgaatctgagacgagcggcaacggggtccgcatctttgccaagtatctgaaagacgccggatatgtgcagaagaagcatttcagactgtttacagagcacggaccggttgaggtggcctttttgaatgaggacggaagccgtctgcgcgtgtccatgggaaaactttccttttacagcgatgatatccctgtgacgggagaaagaagagaagtgatcaacgaggatatggtgtttggcagaacgctttatccggtgacttgcgtgacgatcggaaatccccactgtgtcataccgatgcgggagatatcaaagccgctcgtgtgcaagataggcgactatgccgagatcgcaagatactttccgaaccgtatcaacacacagatcatgcaggttatcgataaggaaaacatagcgatagagatatacgaaagaggagccggatacacgctggcatcaggcaccggtgcgtgtgccgccgcaggcgtggcatataagctcggaatgacgaacaataaagtgatcgtacacatgccgggaggggaactccaggtggaagtggaagacgactggaacgtatatatgacaggggatgtgttctatgtggcaaagatcactctgagcaatgaatttgtagaaaaattaagaagcgtatagtatactaaggcataggaggaaagacctatgcctttacaatttatattcgggccgtcaggttcgggaaaatcaacgtatctttatgaacgtgtcatagaagaatctcagcgttatccagagcagaaatttctggttcttgtgccggagcagtttacgatgcagacccagaaagatcttgtcagtatgcatcccaataaaggaatcatgaatatcgatgtcttaagcttcggacgtctcgcttaccgtgtgtttgaggagacgggcggcggggcgctgccggtgcttgacgacgaggggaaaaaccttatcctgcgcaggatcgccggcagttatgagggtaagcttaaagtgctgaaaggaaacatgaagaagcttggctatatcagtgaggtcaaatctgtcatctcggaatttacccagtacgatatcggggaggaggagcttgagaaggtgatggagacggccgggccggattccaggctctattataagctcaaggacatcctgctgctgtacaaaggcttctctgaatatctggaggaaaagtatatcacaaaagaggagcttctcgatgtgctgagccgcatggcgggccagtctgagcttctgaaggacagcacggtcgtgctggatggttttacaggatttaccccggtacagaaccggcttcttctggagctgatgcgctgctgcagggatgtgatcgtgacagtgacgatggatgacagagaggatccttatgtgtatacgcatccgtatcagctctttgcgatcagcagacagatggtcacatccctcataaggatcgcccgtgagtcttcgatagaagtgaaagagccggtctgcctgtacagcaggccgcttccccgtttcaggggaaatgacgcgctggcgtttctggagcgcagtctgttccgttatggacagagtgtctatggaggagagcaggaggcggtatccgtccacgcagcgagaaatccggaggaagaggcgctggctgtggccgggcgggtgcggaatcttgtgcggacgaagggatacagataccgtgagatcggagtgatcgccagtgatatgaatacgtacggggactatctggagcaggccttcgatatgtacggcattccggtatttatggatcataagcgcagtatactgctgaactcttttgtggaatatatccgcagtctgctccatatggtgcagcagcggttcagctatgagagcgtatttcgtttcctgcggacggatcttgcgggatttacgggcgaggaggtggacgagctggagaattatgtgctcggcctcggtataaagggttaccggaaatggcaggaaaaatgggtcagaaggctgaaaggcatgaaggaagaggacctggggcggctgaatcattaccggacggtatttgtggagaaggtggacggctttaactatgtgctgcgccagaggaaaaagacggtgcgggatatcacgatggcggtctatgactttatggtgcaggaagaactgcaggtgaagcttaaaaggcaggaggaagcgttccagagaagcggtgagcttgcgctggcgagagagtatgcgcaggtataccgtattgttctggaactgtttgataagtttgtggcgctgctcggagatgagccggtgagtctggacgaatatataaagcttctggacgcggggcttgaggaggccagggtgggcgtgatcccgccgagtcccgaccaggtggtggcaggagatgtggagcgtacaaggctcaaagatataaaggcgctgttttttgtcggcgccaatgattcatttctgccgggggcgctcggacagggcggccttctgtcggaacatgaccggcagcagttttcaaaagagaagcttgcgctctctcccgggagcaaagaaaaagcatatatccagaaattttatctgtacatgaatctgacaaagccgtcggacttactggaagtatattacagcaaggtgtcttccgacggcaggagcagcaggccgtcttatctgatccaggagctcaggcgtctgtttccacatttgtccgtggaagatgaggaagaaaaagaactgcatctgcaggagatgacgaaggagactgcggtgagccggctgatcgacgggctcgggagcgcagatattcaggcggatgccggatggaaggaactgttctcgtggtacaggaggagtccggaatttaaagaccgccttgagaggcttatcgaagcgggatattatacttacacgatggacgggcttaccagatccgcggcgaagcggctgtacggggatacatttgaggacagcattacgaggatggagcggtattccacgtgcgcgtttgcccatttcctcacatatgggcttggacttaccgaacgacaggaatacgaattccaggctgtggatctggggaatgtatgccacagcgcgcttgagaagtattcaaagcgggtggaggaagccggaagagactggacggatatcagtgacgggcagcagcgggaatgggtggagcaaagtgttgaggaggcggtgacagactacggcaattccgtgctttacagttctgcccgcaacgagtacatgatagggcggatgaaacggatgctctcccgcacgatatgggcgctgacagagcagctatctgccggtgattttaagccggccggctatgagctgagatttgccaacggtaagatcgacagggtggatacgtgtgaagacagcggtaagatatatgtgaaggtacttgattacaagaccggcatgaaagcatttgacatcgtgtcgctatacgaagggctgcagctccagcttatggtatatatggacgccgcggtaaagctggaacagcgcaggaatccggggaaagaggtcgttccggcaggggtcttctactatcgtatacaggatccgctcgttgagaaatcagaaggagaggaagagcgcagggaggcggtgctgaaggaactgaagccggacgggatcgtaagtcaggaggaagaagtgctgtcccatctggacagagaccggtcgggggaatccatcgctgttcctgtcaaatataataagaacgggagccttgcgaagggttctaagactgtgcccaaggaggacttccgtgctttgatggaatatgcggtggggaaggtatccgccgtacatcaggagatcacggaaggaaatacggcggtgcgcccgtaccggaaaggccaggagacgggatgcgattattgtaaattccggcacgtgtgcggatttgatctgaaggtgcccggctatgcatacagagaactggataagatgagcagggaggaggcgattgccgccatgaaaagggagaaaggagaaggagagaaatgagtgtcgcgtggacagaggaacagcagaaagtcatagatttacgtaagcggaatattcttgtgtctgcagcagccggttccgggaagaccgccgtgctcgtggaacgcatcatagcgatgctcacggacgcggaggatccggtatcggtggacagtcttcttatcgtaacttttacagaagcggcggcggcggagatgaaggagcgtatccgggacgcgattgagaagaagctttcggaggatggggaaaacgaacatctgaagacgcaggcaacgctgatccacagcgcccagataactaccatccacagcttctgtctgtcggtcatacgcgatcattttcatgcgatcgatatcgacccgggattccgcgtcgcagaagagggagaactgaaattgatgaagcacgatgttctcggacaagtgctggaagataactatgaggaaggcggtgaagcgtttcaggagtttgtggaggcctacgggagcgggcgggacgacaggaagatagaggagctcgttctgaagctgtatgagtattcgagaagctatcctgatcccggagggtggctgcagtcctgcgtggacgcctatgacataaagaatgtggaagaactggaaagcagcacatatatggagcttatccggaggcagataaagctgtacatggcagatgcggagagtctgaccgaagaagcactcggtgtgtgcatggagccggacggcccttctgtctatgaggaagcgcttctggccgacagcgggattgtacagagctttcttgcggccaagtcatacgaggagctgtacgaagcttccggccgcataaagtggacgaaactgaaggccaacagggataagacggtgtcggaagagaaggctgctcttgtgaaggctgcccgtgatgaggttaagaagacggtaaatgacgtggcggcccagtatttttaccaggctcctgacggtgtgctggaagacatggcgctgtgtaagaaggccatggctgtgcttgcttcgcttgtggatcagtttgccgccaggtttgaagaacagaagcggacgcagaatatgatcgatttcagcgatatggagcagtatgcgctccagatactggctgtgaaagaaggggacagtttcgcgccgactgccgttgcaggagaatatcagcagcggttccgggagatcatgatcgacgagtatcaggacagcaacctgatacaggagacgatacttacgagcgtgtctacggtttcgcagggaaaaaacaatatttttatggtaggtgacgtgaagcagagcatctaccggttccggctttccaggcctgagcttttcatggagaagttccacacatatgacacaaaggacagcagccggcagaggatcgacctgcacaagaacttcaggagccgttcggaagtgcttgaaacggtcaattatatatttgaacagatcatgacgcctgcgcttgggggcatccggtatgacgacgaggcggcgctttataccggggctgactacggggacagcggggagggaagcagtaacaatacggagatccttcttgtggatacggacctttcgccgtttgcggacgatgaaaaaaaagagaagaaggaggcggctttgtcggacagagaactggaagccagggcgatagcggggcggatccggaagcttttggacacgcagaaggtactggacaaagcggccggaacgtaccgcaaggcgagatactcggatattgtgatcctcacaagaagcgtaaaaggattcagcgacgtattttcagaagtgctgaataaagaagggatccccacatatgcgggcacgagggaaggatattttgagacgcaggagatcggggtgcttctcgattatctgcgcgtgctgaataacaggaagcaggatatcccgctcgcggcagtgctcaagtccccgtttttaggattgacggacgaagagatggccgacataaaaaataaggcaggagatctgccgtttcatgaggcggtgcctgcctatgcgtcccggcaggagacggctgccgcgcgaaggctgaaagcctgcctggatatgatggagcatttccgcaagaaggtgccctacacgccgatccatgagctgctccatatgatcctgaaagagaccggatacggggattacacggcggccatgcccggcggagagcagagaaaggccaatcttaagatgctggcggagaaggcgaaagcatttgaatctacaagctataaagggctgtttcattttataagatatatagaacagctgcagaagtatgatgtggattacggggaggcaagtcttgaagatgagcagtctgatacggtccggatcatgacgatacacaagagcaagggtctggagttcccgatcgtgttcgtgtcaggtatggggaagcagtttaatatgatggatgccagaagcagcgttgtccttcacgcgagactcggcgtggggctggatgctgtggatacaaaactgcgcacgaaaagtccgagcctgctcaaacgggtgatccagaaggaggaggcgcttgacagtctcggcgaagagttgagagtgctgtatgtggcgcttacgagggcgaaagagaagctgatcgtgacaggcgcagtgaaacatgcagggaaaaagatggactcctacggccttacgaagcgccggagcgaacggcagctgtcgttcacccagcttggacgggcgggcagttatctcgactggatcctgccggctatgatgagaaggacagaagagattcctgttgacatagagctggttacggcaaaagatcttgtgagagagtcggcaggggaatatatcagaaaccggctcacagcggaaatgctgaggcgctgggatacagagagggtctatgacgggcagatgcatacactcatagaagaacagttttcttatgagtatccgtatagtttaagtaaaaaccggaagctgaaatatacagtctctgaacttaaaaagagagcctacatggcggaggaggccggtgagcttctttatgaggaagaagaggtcgttccgctcattcccgaatttctgaaagaggaagaagaactgaccggagcttcgagaggtacggcgtaccacagactgctggagcttctggactttacggcggatcacgcagatgcatcactgaaagcggagatcataaggctcagggatgaggggaagatgacggctgatatggcggagtgcatccgcacggaggatatcctgggattcctgaactgcggcgcgggaaggcgtatgagagaggctgcggggaatcagagactatataaagagcagccctttgtgctcggcacagacgcgagggagatgtatccggatgaggcggagggcgaactgatactcgtacaagggatcatcgacgtatattttgaggaggcggacggccttgttgtcctggactataagacggacagggtgaaaaacgccggggagttaaaggaaaagtatcatgcccagctggactattacgcccgggcgctggagcagataaccgggaagcatgtgaaagagaagatcatttattcatttgcgctgcgggaggagatcaaggtctaggggaggacgttatatgtttggcagtgtacggtggaccggaagggcacacaggaccgcccgggagcgctccgccagccggtaatccgtaactgcaagaagcgccgggatcaggcaatcagacctattcggaatgaaatcttgaagagatttctttcctcagaggtcttctcggatgttatttgagataacatcctcgtgcctgattccggtgcttctttcgtaacggcttccgcgtctggctccgaacgctcccgggcagacctgtgtgcccttccggtccacctgtttctttccaagtattttaacgttctcggccgtaaggttttcggggctgtttcaatggatatagttgtatgtggaagagggagtattttttttttatttttgtgatgcgccggggcggcgtttttttattgtatttgttgaagaaaaatataatatgtgttgacaaatgatattatacaacatataatatagatatagaaataatattgatatttacataatattattaaaaatacatggcaaagaggtgataatatggtatttaacaccggagcagctcttttggatgcgattgttcttgcggttgtgtcgagagagaaagaggggacttatggttataagataacccaggatgtgcggcaggcgatcgatgtgtctgaatcgacactttaccctgtgctcagaagactgcagaaggatgaatgcctggaggtatacgatcagcagtttgacggcaggaacagacgttactataaagttacggaaaagggaatggcccagctgaatctgtacagggttgaatggaagaattattcgaataagatcaatgaattgtttgagggaggtgcaactgcatgaatcgcattgaatttatgacagaattagccgcattattacagaatgtacctgtggaagagcgccgggaggcgatgcagtattataatgactattttgatgatgcaggtgaagaaaatgaacagagagttatagaggagcttggaagtcccgcgaaagtggcaggaacgataaaggccggtttgagcggagacgacggcgcgcagggagagttcagcgagacaggatacagagataccagatttgagagaagagacgtaccggcaggaagagaagggtacagatacggagacgaggagcctccgagaacaaaccggacactgaagatcatacttatcgttgcgatcatcattgtaggtgctccggttgtcatacctttggctgtgggaatatcagcggcagtatttgcatgtgtggcagcttcgtttctgttttttctggcgctcgtcattgcatccatagcagtagcgatcgcaggtatatccctgctctgtatagggatcgccaatctggtgcccgcacttgcggtaggaatggcgcttgtcggtacaggacttttactgaccgtgctgggagcgatcgccacggtgggaacgataaggctctgtattattgtttatcccggcataatcagaggaattgtatggctgctgagaagaccgtttcagggaaaggtggtggcgtaagctatgagaagagggtggaagatattctggatcatatgtgcagtcgttgctgtgactggttttgcgtgctgtatggcagcgcttggactcggtgttacagttgaggcgatagaggaacgttttccgaatgggatcggcattgtgaaagacaatgactggcaccacagcggaaagacatatacaggcgatgtggatgaaagtgagacattttctaaagaacagatccgtgagatagacgctcacatatccggaggagaactgcaggttctgcagtcggatacggatgagatcaagatcgagacgtccggagtggattcccgtctgaagctgaaatactatgtggaagacggagaactgaagattgagacgaaaaagcacatatggggactgaacggcgggaaacatataggaaccatatatttgttcgtgccaaaagactgccagtttgaagaggtaaactttgaggtgggcgcaggctacctgtatgtggaagacatattggcaaacagccttgatatagaagtaggagcaggggcggccgatgtagacagctttcgtgccggagaggcaagcctggactgcggggcgggaaagatcactgcctccggactggctgactgggaactggatattgactgcggcataggtgagatcgacctggatgtcaatgcaaagatggaagaatacaattattatatcaaatgcggtatcggccaggtagatgtgggagacgactattattctgggctgggagctaaaaaaacaattgagaacaattccggaaaagatatgaatattgactgcggaataggcaaagtgagcgtggatttttattagacatgaagtgcagcgatcgacaaataaaaaggaggaattagactatggagacaaagagattataccgttcaagggaaaaccgcatgatctgcggagtatgcggaggtgttgcagattatttcaacgtagacccgacactcataagacttggactcgtactgctcgcttgtacaggtaccggcattctggcatatttcattgccgcgatcattgtaccggaccaacctcaaacataaaactacaagagaaaaaaagcgccttttgggcgctttttttctgcaatttgcagaatttgcataggggtctgacccctccatatgagaggggtcagacccctatgcaaattctgtatattttcagaaaacttgtcaatactctctaaaaatgagaaggagtgttttgactatgtctggtaaaaagaataaaccaattaatcttcaggagcttacggatgaggaaaaggtaaaatatgagatcgccgaggagctcggacttctggacaaggttatggcggacggctggaggtcgctgtcatccaaggaaacagggcggatcggcggcttgataacgaaaaagaaacgggagaaggagaaaaagtaacagaattattacgaatattaataagtgtgaacaattgacgacaaaggttgaaaatccaatatccttttgctataatcgaaaaactgaaataacatgataaggtgagcatatgaacgataagattagcgttttagatattgatattgacaactatacggcaaaagaagcgatgaaagagacggtcagctacatggagtcggacccggtaaatgtcgtggagctggtgacggttgacggactgatgcagatggatgaagtgccggagcttaaggatgacataaggaaatttgaccttgtgctcgcaggagacaagacgatcctggaggctgcggagatcacggacagaagaacgatccaggagacagagggacatgtatttttgaagatgttcttccgttatatccataagaaccacaaaagagtctatcttcttgtggagtctgaagatgagggggagcatctgtataattacctggagcattcttacagcggttcccagatcgtgggactggccaaggtatcggcgctgaaccgggcagatgacatgctggtgaacgccatcaacgggggcgaggtcgactgtgtgatatctgttctgtcgtctccgctgcaggaagagtttatagccaaaaaccgagggatcctcaacataaggatctggctcggactcggaaaaggaatacttccggtcggccggaccggtttcggccaggggaggatcacccagtttctcctgaagagaattttcaaaaaagaaattgaaaaaagaaagagagatatgagcggtgcgctcgtgtccgcaaaataagaaaaatataagaaattatttttggtaacaatgtacatggttttgactgtgaaaaatatatgaaaaattgaggaaattaacaaaaaattgttatttcctctttctttttttgttgatatatattaatatagattttagtagtatgcgtttgggggctttgacagctttttttgttgtgaaaaatgcatattgaaatgagtggaggagatggaatatgatatctaatcaaatacttcaaaatacaattgaaggattgaaagggattacgaggatagacttctgtgtgatggacaccgacggtaaatctcttgcaagcactttttcagaacaggagaattatgaggaagaggtagtatcctttgtggaatctccggctgacagccaggtagtacaggggtatcagttttttaaaatctttgacgaacaccagttggaatatattttacttgccaacgggggtggagatgatgtatatatggtagggaagatcgcgacattccagatccagaatcttctcgtcgcatacaaggaacgtttcgataaagataatttcattaagaacctgctgctcgacaacctgttgttagtggatatttacaaccgtgccaaaaagctacatattgacacggaggtgagacgtgttatctttattattgagacaaagcacgaaaaagacagcaatgcgcttgataacgtgcgcacgcttcttggcaacaagtcgaaagattttgtgacggcggttgatgaaaagaatatcattgtcgtaaaagaactggaagccaatgacggccatgaagagctggagaaagttgcaaaggagctctatgagctgctgaaagaagacggtgaggaagatatactgattgcctacggcaccatcgtcaatgacatcaaagaagtttcaaaatcttacaaagaggcaaagcttgccctggacgtagggaagatattcttcggtgagaagaatatcatggcgtacagcgcgctcggaatcggacgtctgatctatcagcttccaattccgctgtgcaagatgttcatccgtgagatttttgaggggaaatcaccagatgattttgatgaggagacattgacaacgatcaataaattctttgagaataatctgaatgtgtcggagacatcgagacagctgtatatacaccgcaatacattagtgtaccggctggataaattacagaaaagcacagggcttgatctgcgcgtattcgaggatgccataacattcaagatcgcacttatggtagtgaaatacatgaaatatatggaatccttggagtattagtaattcaggaggagaatatgattgaattaaaagaagtaacgaaagagtactcaaaaggggtagcagccctgaatggtatcaatctgaagattgaccagggcgaatttgtattcatagtcggcgacagtggttcgggtaagtccacgctgatccgtctgatcatgaaggaactggatcctacgtcggggacgatcgtagtaaacggacagagtctgaacagaatgagacacagaaagattccgatgtaccgcagagggctcggcgttgtgtttcaggatttccgtcttttaaaagacagaaatatctatgaaaatatagcatttgcactgcgggtaacggagaagccgacccgtgtgatcaagaaaaaagtaccggcggcgctgtctcttgtcggtctggcccagaagtataagtcattccctaaggaactgtccggtggagagcagcagcgtgtagccatcgccagggcaatagtaaatgaacctgccatactgctggcggatgagcctaccggtaatctggaccccaccaattcatgggaaattatgaagcttcttgaagaggcgaatgaaagaggaacgacggtactggtcgttactcataaccaggagattgtaaacgagatgaagaagcgcgtagttacgatgaagaagggtgtcatcgtcagcgatgagaaaaaaggtgggtatagtaatgagaattagtacagttggatattcgatgagacaaggggttaagaacatccgcagaaacaagatgttttccattgcatctatcgccactatggcggcatgtatctttctgttcggactgttctattccattgtgataaactttaactacatagtagacaaagcagaagaaggagtggcgatcaccgtgttctttgaggatgagatcactcagagccagaaggataaggtcggtgaagatctgaaaaaggccgatggagttttgaaagtcaactatatcagcgcggatgaggcgtgggataagttcaaaggagattatttcggtgaatccgacgacctggccgaaggcttcaaaagcgacaatccgctggcaaactcagataactacgaggtatacatgtcagatgtctcgaagcagaaagatgtcgtttcctacgcggaaagcctggacggcgtgcggaaggtccgcaagtccgacgtggtggcaaagacgctcacgagtgtgaataagctcgtcggatacgtgtctgcggcgatcatcatgatactgctcatcgtgtctgtattcctcataagcaataccgttacgatgggtgttaccgttagacgggaagagatagcgatcatgaagtatataggagccaaggacggtttcgtcagggcgccgttcgtcatagaaggtctgctcataggaatactcggggccgtgctgccgctcatcctgctgtatttcctttacagtaaagtgatcgagtatatcatggtaaaattcagtctgctcaacaatatagtggacttcctgccggtaatgcaggtatataagacattacttcctgtgggccttgctttgggagtaggcattggcttcctcggaagttttgtgacgataagaaaacaccttaaagtataagatcaagggggatacgtatgatgcgagggaagagaataagcagtgtgctgctggtggcagttctctgtatggggatggcaatgcaggtgaatgcggcaagtatcagcgacacgaagaaaaaggcggaggaactggagtccaagaagaaagcggccgagaacgagaagagctctctggcagctcagcttgagtcgatcgttgccgagatggaagacacaaaggtaaagatcgacgaaaaagagactgagatcgagaagaaagaagaagaactgatccaggcaaaagtggacgaaaatgaccagtacgagagcatgaaaaagagaatccagtatatgtatgaaaatggaaattctcagtttatagagattcttgtacagtcaaagagtatcggtgattttctgaacaatgcggagtatatcacaacgatatcagagtatgacagaaacatgctcgtagagttccaggagaccgtcaagaaggttgaggagcaggaaaaagagcttaaagaagaatacgatgagctggagacgatgcagaacgatctgatcgtaaagcaggacagcgtcaacacgatgctggaaagcaagaacgcggagatcagccagttggagagcgagatcggagatacgacagataagcttgccgagctggaggccgcggcggctgctgctgcaagaaagcagacggaggcgacccagacgtatacaggaaacgcgggagcgtcggtcgcgtcagggaacggtatgttcacgcatccgtgtccgggctacagctacatatccagtgagttcggctggcgcgcgcagccgcttcccggcgcgagcaccaaccataaaggcatggattttgccgcagctacaggcacgccgatctatgcggcagcggcagggactgtagtatccgcaggttacagcggaaatgcgggtaatttgatcatcatcaaccacggcaacggcctgcagacatattacatgcactgcaataatatctatgtaagagcagggcagactgtgagcaggggacagaacatagccgcggtaggaactacaggtaattccacaggtcctcatcttcattttcaggtgatgtccggaggaataccggtcaacccacgtaattatttttaagaacaggactcgtatcatgaagaaaaacaaaggatttatcaaaggggcgctttgcggcgcccttgctgtattattgatcgcagggatcgtatcctgcgcaggtaagaagaatgtattgtccgccggcggggataagatcgtggacaataagacagaggagaagcttagccagctccagggactcatagacggcaaatacctcggggatgtggacgaggatgcgcttcaaagcggaatatacaagggctatatcaatgggctctctgatccgtattctgtctattatgacaaagaagagacagaacagctgctcgagacgacatccggggaatacagcggtatcggagctgttttgagccagaatagagatactggcattatcacgatactgcaggtatacgacgattctccggcgcagaaagcgggtatccaggataatgatatcctctacaaggtggatggggaagaagtgacgggaattgacctgaccgaagttgtctccggcatcaaaggggaagaaggcacggaagtaaagctgaccgtcctgagaggcgatgcaaaggacgaagtggaagtgacggcggtcaggggcaaagtggaggcacagaccgtaaagtatgagatgaaagaagatcagatcggctatatccgggtgacggagtttgactctgtcacatatgaccagtacaaagaagccattgaagacctggagggacagggcatgaaggggcttatcgtagacttgagaaacaatccgggaggaaacttgtctacggtgtgtgacatgcttgacctcatgctgccggaagggctgatcgtatatacggaggataaagacggcaatcgttccgaggagacgtcggacgaggagcaccagttcaagcttccgatgacagtgcttgtcaacggcaacagcgccagcgcgtccgagatatatgcgggagccatccaggattacagcctgggggagatcatcgggacccagacttacggaaaaggcgtagtacagcagatatttgatctaaaggacggcacgtgtgtgaagcttacgatcgctgaatattttacgccaaaagggagaaatattaatggaaagggcattacaccggatgtggaagtagagtttgaggcggacgaggcagatccggaagctgataaccagcttgagaaagcgctggaagtaataaaaggcaaaatgtaaatgcaagggaatgtctgtttggcattcccttttaaattcccttgtgataaaataaaacatagtatgtacttttacaagttagaaaggaagcatatatgaaaatattgattcagaacgggcatgtcattgatccgccgaccggaaaagacggcatatttgacgtgcttatagaagaagataaaatagtcaaagtagagcgggggatagaggatagggcggaccgcgtcattgacgcagaaggcagctatgtcatgccgggattcatagacctgcatgtgcatttaagagatcccgggctcactcataaagagacgcttgagacaggaggaaaagcggcggtcaaaggcggcatcaccacaatgtgtgccatgcccaacacgaagccggtcatagacgacggggagaaggtggcggaggttcacgcgagggcggcaaaggaatcaccggcccacgtcatacagatcggcgcggtgacgaaaggccagcttggccgtgagcttgccgatatagagggaatggccaaagccggctgccacgccataagtgaagacggaaagtcggtgatgaacgcgtcggtttaccgaagaggcatgaaaaaggctgaagagtgcggcatttccgtatttgcccactgtgaggatatcaccatggtggagggcggcgtcatgaacgcggacgggaatgcaacacggctcgggctgaaagggatcaccaattccgtggaggatgtcattgtggcgagagatatcctgctcgccaaggagacaggcgccagactgcatctttgccactgttccacagcggacagcgtggagatgatccggctggccaaggaggacgggcttcccgtcaccggagaagtgtgtcctcaccattttatactgacggcagatgatatccctgcagacgacggcaattataagatgaaccctccgcttcggggcagggcagatgtggaggcgctcagggaagggctgaaaaacgggatcatggacgttatatcgacagaccacgccccccattcagcggaagagaaaaacagatctatggcggaagccgcatttggcatcgtcggcctggagacatcagccgcgcttacgtataccgaacttgtagagccggggatactgacaatgacggatatggcggagaagatgagcacaaatccggccaggatactcgggcttttggacaagggttctgtctcggaaggaaagaccgcggatatcgtgatctttgacacgaggcaggaatatacaatagacaaagacacgtttgtctcaaaaggaaagaacactccgttccacggccgtaaagtaagaggcacagtcagatacacgctggcagacggagcggttgtatatgaaaacgagatacattaggaggaagataaagtgatcaatcagttagtgtccaatattaaaaagacaggagcgccggtcgtagtcggtctcgatccgatgctcagctatattccggagcatgtgcagaaaaaggcgttcgccgaatacggtgagacgcttgaaggggctgcggaggcgatctggcagttcaacaaagcgatcatagacagtacgtgcgaccttatcccggcggtaaagccgcagatagccatgtatgagcagtttggcattccgggccttgccgcattcaggaagacaacggaatactgcaaggaaaaagggcttgtcgtgatcggcgacattaagcgcggagatatcggctccacctcaaaagcctatgcagtcggacatctcgggaaggtacaggtgggaaataatacatgcgtgccgtttgacgaggattttgtgacagtgaatccgtatcttggttctgacggggtcgatccgttccttgaagtgtgcagggaagaaaagaaaggtgtatttgtactcgtcaagacatcaaatccgtccagcggagagttccaggaccagctggtcggcgggcgtccgctctatgaacttgtaggggagaaagtggccgcatggggagaggagctcatgggagacgactacagctatgtcggcgcggtcgtgggcgcgacctacccggagatgggaaaggcgctccgcgcagtcatgccgaaggcgtatattcttgtgcccggatacggcgctcagggaggaagaggcaaagatctggtacatttctttaatgaagacggactcggcgccatcgtcaactcatccagaggtatcatagcggcgtacaggcaggagcagtatgcacggttcggggaggcgaactttgccgatgcctccagagccgcggtggaggatatgataaaagatatcaaaggagcactggaacatgagtaaatataaaggacaggcggccgtcatatcacaggagcaggcggcggccgatatatacagcctgtggatcgaggctccgctcatagcggcggaagcgaaagcagggcagtttctttccctctatacgcaggatgagagcagactgcttccgcgtcctataagtatctgcgagatcgataaagaaaaaggcaggctccggctcgtataccgcgtgaccggaagcggtaccggaaccgaacagttcgcacggcttcgggcaggggatgcggtagaagtaatgggcccgctcggcaacggtttcccgcttgagaacccgggaaaagcgtttctcatcggcggcggcatcggaataccgcccatgctggaactggcaaaacagctcccgggcgacaggcagatcattgcaggctacaaagatgaactgttcctgacggaagatttaaaaaaatatggggaactctatgtggctacggaagacggtagtgcaggcacaaagggaaatgtgctcgatgcggtgcgtgaaaacgggcttttggcagatgtgatctacgcgtgcgggcccgcgcccatgctccgggcgctcaagacgtacgcgaaagagcacgggatcgtgtgctacatatcgctggaggagaagatggcatgcgggatcggagcatgtcttgcctgcgtgtgccagtcaaaagagaaagacagccacagcaatgtgcataacaagcgggtctgcaaagacgggccggtattcctgtcaacggaggtggagatctgatggatacaaaagtaaatcttgccggtgtggagttaaagaatccggtaatgacagcttcgggaacctttggttcaggggaagaatacagtgaattcgtagatctgggccgcctcggcgcggtcgtgacaaaaggagtcgctaatataccatggccgggaaatcccgttccccggatcgcggagacagcatcgggcatgatgaacgcgatcggtctgcagaatccgggaatcgatctgttctgcagacgtgacatcccttttctgaaacagtttgatacaaagatcattgtgaacgtgtgcggcaggacgacggaagattactgtgaagtggtggagcgtcttgcggaggaagacgtggatatgctggaaataaacatatcctgtccaaatgtcaaggaaggcggtatcgccttcggacagaatccgaaggcagtggaagagatcacggctgaagtcaaaaagcgcgcaaaacagccggtcataatgaagctgagcccgaatgtgacagatatcacggagacggccagggcggcggaagccggaggagcggacgtactgtcccttatcaatacactgaccggtatgaagatagatatacacaggcgtacatttgcgcttgccaacaagacaggagggctgtcaggtccggcggtgaaaccggtggcggtgcgcatggtctatcaggcggctaatgcggtgaaactcccgatcatcggaatgggcggcattgccacggcggaggatgccatagagttcctgctggcaggggcgtccgccgtgtccgtaggtacagccaatttttatgatccgtctgcaaccgtgcgggtggcggaaggcattgaggcgtatatgaagcggtacggctttgaacacgtaagtgaactgacagggcttgtaaaatagaggaggataatatagatggaacagtataaaaaagagtttatcgagtttatgatcgactgtgaggtgctcaaattcggagattttgtgacaaagagcggcagaaatacgccgttttttgtaaataccgggttctaccgtacaggggcgcagctcaggaggcttggcgaatattatgcaaaggcaatagagagcagcttcgggtttgattttgatgtgctgttcggacctgcctataaaggaattccgcttacagtggcggccacaatggccatcagcgaattttacggcagagacatccggtattgttcaaaccgcaaagaagtaaaggatcatggggacaaaggtattcttctcggcagcccgatcacggacggagaccgggtcgtaatcattgaagatgtgacaactgcgggcacttccatccaggagacgcttccgatcatcaaggcacagggggatgtgactcctctggggcttgtcgtgtcggtcgaccggatggagcgcggtcagggcgacaagagcgccctcgctgagatcgaggagaaatacggcctgaagacgacggccatcgtcacgatggaagaggtgacagaacatctttacaacaggccttacaagggaaaagttatcattgacgatacattaaaatcagcaattgatgcatattataaacaatatggcgtgaagtagcaggaggagttctcgtgagtgaaaaagcatataagacgatgagttttgcaggggctgccggcattgtcaccggcattgtcgtactggttgccggtgttgcggcaggagtcattatgatcgtgagtggggcacgcttgttaaaagataaaaaaggacttacattttagtccggactgaaagggtgctatatttttgaatgcgaaaaacagaaaaagaatccgcgtgatcgggaaaatattatttgttttttatattgcgtttctcgtttattttcttttgctatcggactggtacggccgtacgggggtgatgcaggaatatcggtataaccttgtgctgtttcgggagatcaagcgtttctgggagtaccgggaacagctcgggatgtttgccatgttcacgaatctgttcggcaacgtactgatctttatgccctttggattctttatgcctatggcaagccgtcacagaagttttttttccgcgctgttctacagcttcgggctgagtctctgtgtggaaacctttcagcttgtgacgaaagtgggcagttttgatgtggatgatcttctgctgaatacaataggcggtgtgttgggttatattatatttgcgatctgtgcagcggtaaggagaagatatgatcataaaaagaaagcaaaaagacaaagaagaaagtagtgcaaaagataaacagaaagagcgggagaaacggcgcagaaagatgatgcgcggcaagtacggacaggcgcctcttaagcatgccaggaaagggatcaattcctgctgttatgcaggcacggtattccttatactgatggcgatgctcgttttttcctacgtgtcaaagggcagtgtaaacgtgatcgcaggctttgccggacttgcggtgatcatactggcctggctcgggcttatgtcggggatccgcggtttccgtgaaagagaaaagaattacataacctgtaaagtaggagtcgtcagcaatgtacttcttcttttagggcttatcagtatatttttcagggggctgttttaaatgatagaggaaagatatgaacttgcaacagaaagaataagatccatctgtgaggaggatacggcggcggacacattccgcggctatttccggcatgtggcgcggtttatcgtgatgctcgacgaactgaacagcgagatggagaagggagtatacgcgcaggcgccgctcgatcatcttaagaggtggaacgaaagactgtatgcggatatactgccggagcattacgggacaagttatgccaatccggactacgcggcagagaagctgggagaagaatacgggcagatactcagttttctctacacagagatcagaggggcggtcgcgtatgtgtttgagggaaagaaagaatatctggatattctgtatgaattatttatagagatatacaatgcatttgaggaaaaagaggcgccggagacagcggcgctcaaggatattgtctactggtacgcaagcgattacagtgacgtgttcaccgcggacagaatcagggaacagacggatcccgcggcgtcatttgcggcggatattattatgaacagcgaccttacggacttgagatatctgtaccggttcggggagtatataagcgaaaatgaatggaagacggcggaacatctgaacagtcttgatgcgtctgtgatccggaagatggcggatacgttcacggaaggctaccggatgggattcatcaacacgggaaaggatctgtccgtgaaatcggtcgtaaacatcagatatgtgctcggtttcgagcgggtcatccggcaggcggcagagaactttgccgggatggggcttaagccggtcatctaccgttccggcgtgagcgtgctgacgaagcgccagcatctgaagactggttattacggggctattgccaataagcagtacgagtatgaccacagaaatgaccagggcctgtttctggataagaagtttgtggagcgcaagctggaagtcatccagtccgcttatgagcagaataaagaactggccgcaggctttgccggtccggcatgtatggatgtctttggggaacggccgtttgttccaaagcagaaagacacggccgtaaaacttacgaagaagcaggaggagctggcgctgctctttgacagccgttcggcccagatcacgaatacgtatatcaaaggagaggagaggagctttacgattgtggcttatccggttcctgagatcggcagtcagtacaaagagatatttgatgaaatcatccggatcaatacgctggacgcctccctatacgcgaaagtgcagcagacgcttatcgacgctctcgacagaggaaaatatgtgaagataaagggaaagggcgtaaataaaacagatctcacggtacagcttcaccggctggcggacccgcagaaggagacgatctttgaaaactgcgtcgcggatgtaaatataccggtcggcgaggtgttcacttccccggtgctggaaggcacagacggagtcctgcatgtgagccgtgtgtatctgaacgaacttctgtacaaggatctaaagcttacgttctccaacggtatgatagctgattatacgtgcggcaattttgagcgggagctggagaataaagaatatatccatgacaacattctgcacaggcattctacgctgcccctcggtgagtttgccatcgggacgaacacggccgcttatgtagctgcgaggaaatacaggatggaagacaaactccctattctgatcgccgagaagatggggccgcactttgcggtaggagatacgtgctacagctggagcgaggatatcaaggtgtataatccggacgggaaagagatcgtggcaagagataattccgtctccgtcagacgtcttaatgacgtgtcaaaggcgtatttccactgtcatacagatatcacgataccttatgatgagcttggcagcataacggcagtcacagcggacggggaggagatccggctgcttgaggacggaaggtttgtgcttcccgggacagaagttctgaacgaaccgctggaaaaatacaataattaggacatgcgtattgaactgccggcgtgcagtatgatatgatttatagatagaatttttaaatacgaaaggatgaagattatgccaaaagtaggaattgttatgggcagcgactcagacatgaaagtgatgagcaaagcggccgacatgcttgaaaagttaggagtagaatatgagatgacgatcatctccgcgcaccgtatgccggatatattttatgattatgccaagtcggcggaagaaaaggactataaagttatcatagccggcgcgggaatggccgcccatcttcccggcatgtgcgcagctatcttcccgatgcctgtgatcgggatcccgatgtccggaaagaatctggacggacaggatgcactctattccatcgttcagatgccgcctggaatcccggttgcgacagtggccatcgacggaggggccaacgccgcaatactggctgccaaaattctggcgacttctgacccggaacttcttggcaggctgaaagcttactcagaggaaatgaaagagacggtacaggccaaatcagaaaagctcgacaaactcggatataaagaatatatgaagcagatgtaaggagaagaggaatggattacaaaaatgcaggtgtagatatcgaagcaggttataaatctgtggagttgatgaaagagcacattaagaatacgatgaggccggaagtgctgacgaatatcggtggattctccggagctttctccatggaagcatttaaggggatggagaaaccaacgcttgtttcaggcacagacggcgtaggtacaaaactgaaattggcatttcttttagataagcacgatacgatcggtatcgattgtgtcgctatgtgtgtgaacgatatagcctgtgcgggcggggaaccgttattcttcctcgactatatcgcgtgcggtaagaatgagcctgaaaagatcgccgcgatagtaagcggagtggcagacgggtgtgtacagtcaggcgcggcgctcatcggaggggagacggcggagatgccgggcttttatccggaagaggaatacgacctggccggttttgcggtaggagtcgttgatgagaaggacctgataacaggaaaagagctgaaagccggcgacgtactcatcggaatggcatcttcgggtgttcacagcaatggtttctctctcgtgagaaaagtatttgacatgacgaaagagtcgctcaatacttattatgacgagctcggcgctacattgggagaggctcttctcgcgcctacaaaaatatatgtgaaagcgctgtccgcagtcaagagcgcaggagtgaaagtaaaggcgtgcagccatatcacaggaggaggcttctatgaaaacataccgcgtatgctctgtgaaggcgtgaatgcggtcgtggaaaaggacagctatcccgttccgcctatcttccggatgcttgcgagggaaggccagatcgaagagaaggcaatgtacaatacatacaatatggggatcggaatgatcgtagccgtggatgcggacgatgtggacaagacaatgcaggccgtcagggcggcgggcgaagagccatatgtcgtaggccgtatcgaggcaggtgaaaagggagttacattatgctaaatgtagttgtgctcgtatccgggggcggaacgaatctgcaggctgtcatagacgccgtggattctggcgctgttgccaatacaaagatagcaggtgtgatcagcaacaataagaacgcgtacgcactgcagcgggcgaaggataacggaattcccggagtatgtatatctccgaaagaatttgcgtccagggatctgttcaatgtgaagttccttgaagcggtggatgagatgaggccggacctcatagtgctggccggttttcttgtcgtcatacctcccgcgatgatagaaaaatacagaaaccgtatcatcaacattcacccgtctcttatcccgtctttttgcgggacgggctactacgggctgaaggtccatgaggcggcgcttgcgcgcggagtgaaggtggcgggagctaccgtacattttgtagatgaggggacagacaccggtccgatcatcctgcagaaggcggtggatgtagaacccggggataccccggagacgctccagcggcgggtgatggaacaggcagaatggaagatactgcccgaggccatcggactcattgccgcaggcagggtgagcgtaaaagatggaagagtacagatcaaagcgtaaagcaggaccgtgtgtctgcatatgaggagggaacgcgatgaaacgtaaaaggttgtggatgattctggcagcatttatgctgtcggcggcgcttgcagggtgctcaggcggcagcagcggcaaagaggacaagagccagaagcaggaagagaagaacaggcaggacgaagataaggagaaggaagacgtaaaagaagaggtcaaagaatatgcgccgggcactgtggacggcaatcactatgaaagcgagtggatgaacgtgcgcattgaccttccggaaggctttgtcatggccacggaagaagaaattgcgaatattcaggaggcaggcgtccagtttttggacgatgaggaaaaagataagctcaataatgcccttgatgaaggcacgactttctatgagatgatggcggcgaccttgacaggcaatccaaatgttaacatatcagtggagaaactgccgtataaaaacgcgacagcagaacagtatgccgatgttacgaaggaagttgtcgagaaaagcatgacgaacggcatgacggcctctttccaggaaggcaccacggacgcggtactgggcggacaggaatataagtgtatcgcaggtacggccaatgtgcaggcagaaggagtcagtgcggatcttaatatggatatgtacatccgtgtacaggacggatacgccatagtggttaatatcacttatacggctgatacggtggcccagaaggatgaacttctggcagctttccaggagttttaaagcctggtgccggcaatacggcataacatgataaaggttgacgggaacagatacaggaggagaacttggaatgaaggtattaattgtcggaagcggcggaagagaacatgccatagcttacagcgtggcaaagagtgataaggtggataagatttactgtgctccgggcaacgcggggattgcggaacttgcggaatgtactcccatcggcgccatggagtttgacaagatcgtcgcgtttgccaaagaaaaagaaatagatcttgtgatcgtaggtatggacgacccgcttgtgggcggtctggtcgatgagctggaagcggcaggtatccgcgcgttcgggccgaggaaaaacgctgcgatccttgaggggtcaaaggcattttcaaaggaccttatgaagaaatacaacattccgacggccggatatgagaattttgaagatccggatgaagcgctcgcatatttgaaaactgcaaaacttccaattgtactgaaagcggacggacttgcgctcggtaagggcgtgctcatatgcggaacgtacgaggaagcggaagccggagtgaagacgatcatggtggacaaacagttcggaacatccggaaatacgatggttgtggaggagttcatgaccgggcgtgaagtctccgtattgtcgtttgtggacgggaatacagtgaagactatgacgtccgcccaagaccataagagggccggggacggcgacacaggtctcaacacgggcggtatgggaaccttttctcccagtccgttttatacaaaagaggtggaggaattctgcggcaaatatatttaccaggcgacggtcgatgccatgaaggcagaaggcaggccgttcaaggggattatatttttcggccttatgctgaccgaggaaggcccgaaggttctggagtacaacgccagattcggcgatcccgaggcgcaggtcgtactgccgcgcatgaagaacgatattgtcgaagtgatggaagcatgtgtggacggtacgcttgataagatagacctccagttcgaggataatgcggcggtatgtgtcgtgctggcatctgacggctatccggtcaagtatgacaagggcctgccggtcaccggacttgaagaattcagaaaacacgacgggtactactgcttccatgccggaacaaaattcgacggagagcagatcgtgacgaacggggggcgtgtcctcggcgtgacggcaaagggcagagacctgaaggaggcaagggccaacgcctatgcagccacggaatgggtgaaattcgacaacaaatatatgcgccacgatatcggaaaagcgatcgatgaggcgtagagacggcaatgaaagaattctgcagtgtatgctgcggaagaaaaggagcatggaaagaattgaatgatattcagttgatcggttacagcatccgcagtcagaggcggaagaaaggaatgacgctgcagcagctttctgaggcgacaggattgtcgatcgggtacctgagcaatctggaacgcaacgcaaacagtcctactcttgtcaatatccagaagatatgtgaggcattcggaacttctctgttcagccttctggagacgaataaagaagaagacattatcgtccggcataatgagcgtgagccgataatcagtgaagaacataatatgaaacttgaaaatattgattttgggctggacgatacttcttttatctacatgacgatcgaaccggacggagctggcgacggactctggtgggaacacgaatatcatgaggtcgggaccgtgatcaaaggccgtctgacactgaaactggacaatcaggtatttgagctggatgagggagatacgatcctcataaaagcccatacacggcattgctattataacaagacacaggagagctgcgtctcctattggacaagatgtaaagaaataaaataaccaatggcactaaggcgcctgaattaagaaaacatttaatgcgaaagtcggcatggctcattaggctatgccgactttcgctatttcattgtagttttgggcttgctgcgtggccttgccagctatgaatccaatgattataaagacatcaaccacgggaaccttatcgcgctggcagatttctatggcgtgacccttgactatctgttctgccggacggagaaccgggagcagatcaacacgccactaacagaactccacattatcgaacggtatcgccccggcgaggatgccccatatctgaaagtgctgcaagccgcccatgtggatgatgatgaatatttcagccgcatggtgctggatgatataaacctcattatccgggatgttcgtgcgctgcataaaaaggacagcgagagcgcaccgctgaccacggttgccgatgagctgaaagaaaatctgtccgaagaagaaactcgctggcttatacggattcttcaaaaatcaaagaaaatgaggacacctatcagccagagaaagaagcgtaaataaaaactgccgttgagggaatgggcgttcctgcaacggcagcttggggatatacctattcaattcagaatcgggcatattattcaatgtattccatcaacattttgcgtctttttcgttgaaattgattttcttgcgtttaataacactctttatcattaacataacaatgatgtacacagcgcatacaatcaatccggaaattgccattttcataagccctacagaccatgctactcgaagtcttgctaactgatattcttgtattccaccagataaaattacgggaacgcccacttttaggataggaatacatgctcccagtaagaaactgataattgctcccagaattaaacttgccttttgatacaaattgatttttttcaaatatgccacctctttcttttctgtgttggaagttattgattccaaagttgccaactcttttttatatgccgaatattctttttgacagtccgaacatttttctaaatgctctttgatatacccatttgtttcttctgtagttagaccatctacatacaaaggcaataaatcatgaattatattgcacgggattttgtcattcatttttattcatctcctcaattattctttttttccctcgatagaaattaacacgtgcccagttttcctttttgcccataatttctcctatttggtaaaaagaaagttctcctatcaatcgtaaatacataacttctcgtattggctcatcaagtcgatgtatcaatttcaatacttccgtgttctcccattgaataaatacttcgtcttcagcagaaatggtttgagatacattttcaaaatctaaaatatccgcatttaacttgttgtctctcaaatattttagccaaagattttttgcaattccgcagagccaggtcaatacactgctattacccttaaatttatcaatggcattcacagcatagaaaaaagtttcttgtgttaattcctcggcaagttcgtgactattggttttgcttagcagaaatacatatactctttgagaatagttttgatatatctcctctacggtttccattttcatcctcctttctaagttagtaccataaagcagcgattcgttacaataaatatctataatctttcaagtgaaaagcagagcgtatttgctctgctccataaactttcttcacatttgtttagaagcaatgtcacttcgctttgaaagcaaatcacttcatttttccagttctatcacatcagtaatatcgcaatccaaagtctcacatatttttatcaacgtttccatgctgatgtgctttccttttcccatattggcaatcatatttgtggtaagaccggcggcaagccgcaagtcctctttcctcatatttcgttctttcagtaagttccaaaggggttgatagcttatgtgcatttatcgccctgcccttctcccggtatcggggtttctgcttcccattatatcaaaattcttgccaactcacaagatttcttgacacagccgccgggttcgtctggattgtgcttttcctttccgctttttcattacacacgaacgcacaaaagcggttctcacaggctgacctttgtgtatctgcggtaaatccaaaacttatcaaagattttggagataattctctccgcaaagtcaagtctgacaaagcagatgcagtaaaaattgcccgctatactcttgatagttggacagaattgaaacaatatagtctcatggatgaaattcgtaatcaacttaaaaccatgaaccgccagtttgatttatcaaaaatggtgtaaacgtaagaagtacaacttcagtcgatcaaaagctgaagaaatttacgaaggagctaaggagcttgtttccgtacttccagaagacgattgacaaggttgatcatcagacaggctgtagatcaattaaatactgcttcccagaccatagaacagcttcgtaccatgatgaatgaggctgcttcaaaactgcccgaatatccggttgttatggtatgaaaggtgtcggcaagtcgtttcaagtcatggatgcccttatcaaaacaaaacctcaggacgcccctgtttacttgttaatggataagaaacgggcgcaaggcaagccttactatgtctacatgactgccggtgcgaataagtttctccgcatctacaatggacgggtgaaagaatatctttcaacgctttcagagtaaccatctcatacatacctttgtttcagaccagcgaatatcggtggcctattttcaatactcgaaatcccacatcaatcttgtatgcgtcgttcggctccgttcctttccggctgcgtagccgctgcgcccttataaggcaagggggtaggggaatggataggaatggaatgggtacttgataaatccgtatttgatgtttcagtaatagatagttctttatttagttgcgttggattttcgctgtgcggattgcgtcgatacccggttgatatgggacagcccggcaagggtataatcccgatcctcctgcaaggaaagcatttgcgacagtaggcctttggcctttaacgtcaattccttatttcgcaagtggtgattggacataactgtgtagaccttgtttttctccactcggaatacagccatagcgtaaaacctcctttcgttctgaaaaagcgcataaaaaagccgtagattttcaaggtcaaaaatctacggcgtagccggacaatggaaaaggaatacggtgtagtagtatccctttcacgttagatattcagttttttgtaccgttgccgcttgcccgctgccataaaaacattgatatcatggggtttctctttgttttcttatgtcagtggggcatatatgccgcagcttagtttataagccatcgacaaaacattgtcggcggcttttttgtgtgttgaaaaagcagatcggatataaaaaaacaaatataatatcatataaaatgaaaatatataaaaatatttcatatatatgaaaattatatttacaattattttgtatgtgatataatattaacaaatataaaaaagatcggcggtgaaaaaaatgaaaaagtcatatttaattatttgcggaaagctttttgacggtatccgcgaagaactgcagcctcatatggagatacttgtggagggaaataaaatagtatctacaggcaggaacctgtccagaccaaaagaggcggagataattgatctggggcatctgacggtgactccgggaatgatcgacgcccatgtgcacgggaatctgatgcgctggcaggagacggacaatatattgtttcagtcggaggggtacagtacgcttgctttcctgcacactgcgcagcgctgtctcgagcgggggtttacgacaatacggtgcaacggcatgggaccggggggatacgggatcgtggacgtcagagaggtgatcagcaggggactttttccggcggcgcggatgaatgtgggggcacatatgctgggcggcccgggaatgccgggggatatgagcatgtacgcgagcacgaacgagccgttatctgactttatgcagatcaaaacgatcggcagcggcagagactttttcagggatcaggtgcgcagagaggtaaaatacggcacagactttataaagatatttttgtccggcagttttttgagcccggacggaggtccggagatcagttatcttgatgacgaagagctggagatcatcatcaggacggcccacgacctggggaaaccggtcacggcccatgtttatccgccccgcatgatgaaaaagctgctggagttcgggatcgacggaatggagcacggggcgctcatggatgaagagacagcgcgcacgtttgaaaaacaggatacatatctcgttcctacattttcaccgtttcaggatgtaatagaaggaaatgatgaacttgtggacatgaatactgaggacagccgtatgaagctcaggaagtatgcgccgcagctcagggaaagcagagagatcatccgcggcagccagatacggctcgggtttggatcagatttctgtgctgtacatcagccgtatgaaagctggtatgaataccgcagctggatgcggtccggcatgggggcgttcagaacactgaaggccgccacgagcgtaaatgcaggcatactgaggatggaccatttgatcgggacgatcgagccgggtaaacttgcggatatctccggctggcacagagatctgatggaagactgcgacgctctgagcgagtgtgattttgtcatgaaagacggaaacgtttatcctgccggcaatactgttgtggacgaatatacagtataggcacatataaaagaaaaggggtatgtttatgaagacattggaagagagaaggaaaaaattatgcagacttctgcgggaggaaggaatccagaaggcggtcatcggtgaaccgatgaacattgtttatctaacaggtatccatatcgttccgtacgagcggttctacggtttggtggcggacgctgaaaaagaggagttcaccatgatcaatccaggtgtggataccggatgtatgaaaggtacattgagagaagtcacatatcaggacgaaaacggaccgtttgaggctgtaaaagaagtggtgggagcgtgtgatgttctcgctgtcgacaagaagtattactctatggcagtgggagagctgttcgcgggactgcagtgcaggatcacagatatcggcatgtgcgccgcgaagctccgcatgtacaaagacgacagcgaagtggagacgatgcagttcgcggcaaagatcgtagatgaagccatcgcgtatgtatcagacaggatcaggcctggaatgacggaaaaggaattaaacatgatgctgtatacttatatgtcccggtatccgggattcattacggatgagttcataatccttgtgctcgccgcggccaactctgccaatccccacggggtaagcggggactatgccttcaaagaaggggatattgtgctgatggatttctgcgcgtattacaattattactggtcagatatcacaagatgtgtatttgtcggcgaggcaaaggatccaaagcttgtggagatctatgagatcgtgcgcagggcaaacctggcggcgatcagcgcggtccgcccgggggtaaaggcgaaggagattgacaaagccgcgcgggacgttatcaccgaggccggatatggcgaattgtttctgcaccgtacagggcacgggctcggtctgagtgtgcatgaggaaccgtatataacggctgtcaatgaactggtgctggaagaaggaatgacctttacgatcgaaccggggatctatatagaaggaaccggcggcgtgcgcatagaggatgatattcttgtgacaaaagacggatgcagaatcctgaccggtacatcaaagaaactggaagaccacattattcgatactgatttactgccgcttaaggaaaggtgggatacatatgaagaaggagaacaagacaacgggcaagttaaaaggtaatatgccgaccttgatcatattgatcatttccggtgcgctcatatatgcgctgccttatttcagaagttattattatgattcatttgtaaaacttttcaatatcagcaatacgcagatgggcgctcttggcagtgcgttcggaggggccagcgtgtttgcgtattgtctcggaggcttctgtgccgaccgctggccggcgagagggctgatgaccatttctcttattgcgaccggactctgtggttttatacttctgctgtacccgccgtatggggttgtatttatggtccatctcgtgtggggcatcacgtcaatacttacgttctggagcgcgcttgttaaggcgatacgctctctggcagattcggacgaacagggaaaggcattcggcttttttgaaggaggacgaggtatcgtcaatatagtacagtccgccatcatacttgcactgttcggatatatctccaaggcggtatccgaaaaagcagccctgtctgccatcattgcaatctactctacgatatgtatccttctgggggccatggtattctttatgtttaaggaaccggagcgtaccgatggggtgccggagaaattattcaacataccggtgcttaagcgtgtggcgaaaatgcctactacatggctgcagattctcgttatcttctgttcctatgcaatgataataagctacttttatattacaccgtatgcgacttccgcgtttggtgcgtccgctatcatcgcggcggcgctcgggtatttctcgcaatactgccgcccggtcggctgttttgtatccggcatactggcagacaagttcggttcctcaaagatatgcgccatatcctatgtcataatgatcgccggcatcgccgggctgatcgtgacgccgggcagtccttccatgatatggatgatccttgtgttcatcgctgcgatctacgcgtctatgtacgccatccagtccatgcactatgcgatcatggaggagggggattacccgcttgagatcaccggaactgcgaccgcgatcatcacgccaataggatacagtgcagaattcttcatgccgatcataggaggcatgtgcctggaccactggaataattcagagaccggatacaaggttttcttcggtatcctgggagcgctggcgctgatcgggctcatagcgatccttgcatggatggtgatcacgaaggaaaagcggatgcagatcatggcggaaaagaataatggaaaagaataacagatgagaataacggatatggaaggaaccccggccgggggcgcgccgcatgcggcgtcaccgggccggggtcctttttgagttctctgcagatttctccgggcagtcttaattctgatttctgctctgtgtcagcgtatattcaaaatggtctgtcagataatacgttgtaaaaagttcaatgggtatctcactgtcctctgtcacaccataggtcagacctgaggaatagagcagaggggtatccctgcttatgtcgagatgcttcatgacgtccccgtatgcagggactgccttcagcttcagcgcggtagttgatattttcaccttgtagttttcttcgatgatcttatagagagaactgtttttgaagtcatagccctcgatatcacggaagatctcatatggaagcgtggtctgggtaaagcacagcggcgtgtcgtccgcatagtatatacgttccagataaaataccgggtctgctttccgaagctggagtttttctacctcctccgggctgcttatgcgtatctcggatctgatcactttgcgtcctggcgtcatgccctgtcgtatgatctcttctgtgtagctggagatggaagtaagttcctggagccgtgcggttcttctgacacacgtgcgtttcccctgcattttttcgatatatccgtgatgataaagctcatcgatagcccggcgcgccgtcacacggctgacgccgtaggcggctataagctgggattcgctcggcagttccgctccgcttggcagttctcccgactgtattttctcgatcaaatcgtgttcaattattttatatttcggtttgttttcgctcattttaattccctcttttgagataaaaccgtaaatacggtaaatctgtctttctatgcttattataaggaagatcctggtttaagtaaacctgttattataagttgaaaaactggaaaatatatctttgtatagtatgtacaaaaataagtcgtattattttgctaatattacaagttgactatataagaaataaaacttattataataagtgaaaggagacataataatatggaagacaagatattgggagttttatacggaatggccatcggagatgcgatgggtatgcctccggagctttggagcagaaagcgggtgctggagcattatggggagatcgtggatttcctggacggttgtccggaaaatattatttcctatcaatataaagcagggcagtttacagacgatacgagtcaggcgctgaccatcctcgacagtctggcggaaacagattttgtgccgtccgccgaaagtatagcggagcatattttaagatgggcggagaaggagaatgcatttgaaaataacattctcggtccgacctccaaggttgcgctgcagctgttccgggagggaaaagatgcccggagcttctcggatgaggcggtatccaacggcgcggctatgaggatcgcgccggttggcacactgtttgaaccggaagacagagagcggctcagcgattacgttgccgccatctcgcaggtgacccacacgagcgatataacgatcgccggagcgtccatgatcgccatggctgtggcgtcggcaatgaaatatggagacagggagcggatgatagaagatgccctgtctgtagaagcgtatgccatgtcgctaggggcgtccacgccgagtccgtctcttagtgccaggacaaagctggctgtgggttacgccagagagtaccgagaagacagcagggcatttctggaacatatatacaacataatcggcgccggcgtaaatacatcagagtcagtaccggcagcgctggcgatcgcttattacagctttgatgtcaggacatgcgcgctgctttgtgccaaccttggaggagacacggatacgatcggcgccatggcggcggccatatgtggaggcgccgcaggtaccgccggcattccggattcctatatggcgaagatcaggcaggcgaataaagtagatctggaaaagtacgcacaattgctggcagagaaacgggggaaggtttgatgagtaaaaagtgtctgataataggagccgcaatgctggatatcatcatggagatagaccggcttccgcggtccggcgaagatatctatgcgaaggcccagaagatgacggtgggcggctgcgcgtataacgccgcggatatcatgaagcattttcacgcggagcatacgttattcgccccgcttgggaccggtatgtatgcggaagttatcgaagaggaacttaaaaagaacgggcatgaaagcgctgtaaagtccggtcgtatggacaatggatactgtctgtgtatggtagaggcagacggtgagagaacattcgtcaccttgccggggatcgagtctgtatttgagaaggaatggtttgactcactgaacatggaagactatgagtccgtctatgtgagcggttatgagatagaaggggcgggcggagatgtcatacttgattttctggagcgctcgccggagcttctcgtgtattatgcccccggtccgaggatctcttacatccctgccgaaaaggcggacaggatgtacagcctgcatccggtcctccacctcaacgagacggaaagcctggcggcttccggcgcggatacggcagaagaggcggcagaacgtctggaagagatgactcagaatacagtcattattacgatgggagcagggggtgtccttctccgtgaagagggcagaacttccgttatacaagcggaaaaagcagaagtggcagatacgatcggcgcgggcgattcacatatcggcgcggtcatggcgatgcgtgcgtccggcgctgattttgaaaaagccgtaaggacggccaacaaagtctcggcgctggtcgtaggcgtgaagggaccgacattgacgaaagaacaatttgagaaaggactatagacatggaaaagacaaaaagaatttttgcagactggagcaggtttgagatctgctggctcgtattatctacggttatcatgatcgtgctcagtgttatatggggggacaaccttcttgcgctcatcagcggtatcaccggtatccttggggtggtgctggcggcgaagggaaaagtgagcacttatatttttgcgacggtcaatgttgccatatatgcgcttcttacatttcagaatcatttatacggcgagttcatgctgaacgcgttctattatattccgatgaactttatcggcttttacctctggtccaagcataaagacaatgagagcggggaagtggaaggcaagaagctgaccggtaagcagacggtcatactgtttgcggcagtggcagtcgttgtgctcgtgtactggcagatcttaagccgtatcggcggacagcttgcgctcattgacgccatgtcgaccgtattttcggtggtcgctctcattatgcaggtggcaagatatgcagagcagtggcttctgtggatcattgtaaatgttgtatcggtcgttatgtggctgcttctcatcgggaaagattcttccgcggtgacgatggtcgtcatgtggatcgcatatcttttcaattctgtgtacggatattataactggaggaaactggcggcgaaaaatgtagacaacaaatagagaagataagaaaaaaacagcgtgccgcggcgcgctgtttttatattgtagtatgagacagtgatacgtcagtcaatagtttcctaattcgccgaggtatttatcgattttcttcaggcggcgttcgattccttttactttatggctgaccgtatcgagcaacgcttcggctacgaactgcggggcgaccatcgagttgaaaaaggtattgctgtccacgggaaccgtgaacagaacagtagcgtactgggcgagcagcgcgcttggtttgtccgtgatcactatgatctttgcgcccacctcatacgccattctggcagatattttatcgatggaagaataacgcgggaaactgaatgccaccacacagtcgtccttcgagatgttgcacatatgatccaccgggctgatcgacgcggtattcgtcatttccacattgggaagcatatgcttcagatacagcagaaaatagtcgccgagacagctgttgccccgggaggaaataatatatttccttttgcttgatatgatagcttcagcggcttcctcgaaaagcgccgtgctgttatttacaaatactgcctccatatttttggccgcgtttttaaaatgtctgttaatatagtcggagctcgtatcgagctttgctctctttgccactctctgtgaaggtactgttatagaacttgagatgctgagaactttgtcctggtaatccttgcgcaggtttttctgaaaatccataaaaccgtcgaatcccagggagcggctgaagcgtatgacagaggattcgctgactcctaattttaatgctatttcggtggaggtcataaagcaggcatcagcagagttgtccaacacgtatctcgcgatcatcttttgtgtcttggtgagattggcattgttaatagtttcccttaattctttcatactttgtcctccgaaagcatacgtatttctatcctatacttagatttaatcacgaaaaactgaattttgcaagaataaattgtaaatacaactgacataaaattaacacaattaaaagtttttgttaaaaatataacttttattgaatattattgacggctgtgatactataattttagagacaaatgaataatattcttcacaaaatcgagagggtgaaaaatattgttcatgaaaagtcaatgccgaacgcatggcagtcaaactaacataatttttagtaccaataggaggtaaaacaaagtgaaagtaggatgcgtaaaagagattaaaaacaatgaattccgtgtaggtatgacacctgacaacgtaaagagttatgtaaatgcaggtcacgaagtttacattgaaaaaggagctggtgtaggttccggattcatggacccagagtacgaagcagcaggcgctaagatgatcgacactgctaaagaagtttgggatacagttgaaatgatgatcaaggttaaagagccattgccggatgagtatccattattccacgaaggcctgattctttatacatatcttcatcttgcagctgacaagccgcagacagacgctcttttgaacggaaaagtgaaaggtgttgcttacgagacattgatcgagagaaacggaagcattccgcttcttgctccaatgagccagatcgctggacgcttaagtatccaggaaggcgctaaatatcttgagaagacattcggcggagaaggcgttctccttgccggcgtaccaggaacaccgaaggctaatatcgttatcctcggcggcggttccgttggaacgaacgcttgtaagatcgctgtaggtatgggcgctaacgtaacgatcatggatatcaacctccagagacttgcatatctggatgatatcttcggagcacgtatccagacattggtatcaacagatgccaacatcgaaaatgtaataaaggacgcagacctcgtgatcggatctgtattgatcccaggtaaagctgctcctaagatcttcaagaagaaatatctcaaagagatgaaaccaggcgctgtattcgtagacgttgctgttgaccagggcggatgtggcgagacaacaaaggttacataccatgatgatccgatctacgaggtagacggaatcgttcactactgtgtaggtaacatgccgggtgcagttccaagaacatctacgattgcacttacaaacgctacattaaactacggcttacagatcgctaacaagggccttgagaaggcttgtacagataacgacgtaatctactctgcaatcaatacatatgacggaaaactcacatgtaagaacgttgcagacagctttgacagctatgaatacgtagatatcaaatctttatggtaaatcggtaattgacttttccaaacttaattccttcaaagttgcaaaaggacttacggcttcggccgcaggtccttttaaattgtcagaaaacgggaagaattttgaaaggggtcagacccctatggccataggggtctgacccctttcaaaatttacacttgcggacaaaaactatgtgtgctaaggtatatataacaaaagacacagtgagaaaaggtgataatatgctgatagagattgattttaacagtgatgaagcgttatacatccaactgcgcaaccagattatcatggggatcgccacggctacgatccacgagggagatccgctgccttccgtgcggcagcttgcggacacgataggcattaatatgcataccgtgaacaaggcgtacagtatactgaagcaggaagggtttatacagctggaccgcagaagaggcgccgtgatagctattgatgtcaataaggtgcaggcgttggaggagatgaagcggcagcttcagatcgtcctggcaaagggcagttgcaagaacattacgagagatgaggtccatgcgctggtggatgagatatttgaagaatattgttaacagcaaaattaagttggaaaggagttatgatgcagaaaaaagcatcataagcagacagcatgaattatacagaacaggccaatgaagtattacagatcgcaaaggcaatagcgagagagctggaccatccgtatgtcggcacagagcatctgctgctggggctgagaaaggtttacaccggtgttgccggccaggtccttgcggccaacggtgttgacgaggaaaatatactgaaagtggtggacgaacttgtctcaccggtgggaaacaccacagttgcacacaatccggagttcagcccgagactccagtatattctggaggaaagcaaaggggaggcactccgtttccggtcctctgacgtcggaacggaacatatgctgcttgccttattaaaggaagtagactgtgtggcagcacgcatacttctgacacttggcatcagtctgcagaagctgtaccaggatgtgctggcagtgctcggagcagacccgaaagaatatcaggaagaccttatgcaggaaagcggcagaaagcgggatggggtgctggaacagtacggtacagatctgaccgcggaggcggaagaaggcaagctggatccggttatcggaagagaggcggaaatcaaccgtctcatgcaggtgctgagccggcgcacaaaaaacaatccgtgcctcgtaggagaaccgggggttggaaagactgccgtcatcgagggactggcatcgcgtatcgcgtcaggtgtggtgcccgacagcatgaaagaaaagcgtatccttacgatggacctggccggaatgatcgccggctccaaataccggggcgagttcgaggagcggatgaagaagctcattcaggaagtaaaggcggcaggaaacattattctctttctggatgaagtgcacacgatcatcggagcaggaggcgcggaaggcgctatggatgcatccaatatactgaagccgtcgctggcaagaggggaactgcagcttatcggggctaccactatagtagaatacaggaaatacattgagaaggacgcggcgcttgaacggcggttccagccgataaccgtggaagagccgacggaagaacagtgtctggatattctccgggggctgcgttccagatatgaggaacaccatcacgtgacgatcggcgacgaggcgcttgacgcctcagtccgtcttgccgaccgctatatcagcgaccgtttccttccggacaaggcgatcgacgtgctggatgaggcgtgctccaaggtaagcctgaaagggttcaaggtgcctgacagtatctttgagctcgaaggtacgatcacagagctgatgaaaaagacagaagatgctgtgagacagggaaatatgcaggaggcatccgcgctgcacacggaacaggaggaagcagaaaagaaactggaggaggtcagaaagcgtttcaggaagagaaatgcgcagaaggagctctatataacagaagaagatatcgcagatgtagtgtccgaatggacgaaaatacctgtcaaacggctggcagagtcggaaagcgcaaggctcaacaagctggagcagacgctccacaaaagggtcattggacaggaggaagccgtccgggccgtatcaaaggctataaaaagaggccgcgtaggcttaaaagacccgaagaggccgatcggttcattcctatttctcggtcctacaggagtcggcaagacagagctgtccaaggctttatcggaggccttgttcggcaacgaagagtcgatgatacgggtcgacatgtcagaatatatggaaaagcacagtgtagccaagatgatcggctcccctccgggatatgtaggccatgacgacggaggccagctgagtgagcaggtgcgcagacatccgtattcagtcgtattgtttgacgagatcgagaaagcgcatccggatgtgttcaatatactgctgcaggtgcttgacgacgggcatatcacagattcacagggaagaaaggtagacttccgcaatacggtgatcatcatgacatccaacgctggtgcgcaggccatcatagacccgaagaagcttggatttaacgcaagggaagatgcgtccggcgactataaacggatgaaggacaacgtgatgcgggagataaagctgattttccgtcccgagtttgtgaaccgtattgatgaaattatcgtatttcatcctttgacacaggaggagatgaagaagatagtaggtcttatgtgcagagaattcacaaaacgtgccagggaacagcttgatataacgataacggtcagagattccgtcaaaaagcacattgtggagaccggcacggaccagaaattcggagcacggcctctgcgcagggcagtgcagaaccagctggaagaccggctggccgaagcgattctgtccggtgaagtggaaagaggctcggcagtagagatcggaatgtctaaaaaagatattaaatttatttcaaagactacaaattaatactgttttgatatataataggggtacaaaagaagaaccttaggaggataaaatcaatggcagcagtgaaagagcttttgaaggctgaagcagacgggacacttagttttggggactacacgctggacagtaagacaaagctggatggatttgaatttcagggcgatttatacaaagtgaagaccttttcagagattacaaagttagagaaaaacggtatgtttgtatatgaatctgtgccgggaacagcagtggaaagctttaaggcaacagaggaggaagtatcatttaaggtatccggaactcaggatgcgcagttcacactggaacttgaggcggacagcgaatatactgtctatatggacggagcggatgccggtgatatgaagacgaatctgagcggtaagttgagtgtcagtgcagaactggagccagatgaatgtgttgaagtaagagtcgtaaagaagtagtaccggatgatcagtaaaaaggtcagccccctgcctccacagggggctggcctttttgtaactttatatttcagatataacagatcatatataatagaaatgatatgataatagaggagagaaaatatggcaaaggggaaaaagagtatatttttctgccagaactgcggacatgaagaaggcaaatggctgggccagtgtccggcctgtaaagaatggaatacgtttgtagaagagaaagtgacggcggccagaccaggcgccgcaaggcagatgaaagaggccgaagtggtggcgctgtccggtgtatctacagatgaggaggccaggataaagacgacgatcgaggagatggaccgggtgctcggcggcgggatcgtccccggttccctcgtacttgtagggggagacccgggcattggaaagtctacgcttctcctgcaggtatgtcagaaactatcgcaggaaaaagaaatattatatatatcgggagaggaatcgctggcccagataaagctgcgcgcaaaccggatggggccattcaaagacaaccttctgcttctgtgcgagacaaacctggagctgatacgttcagtgatagaaaaacggcgcccgcagcttgtggtgatcgattcgatccagacaatgtacagtgaggaggtggcgtccgcaccgggaagcgtatcccaggttagagagtcgacgaatgtgttcatgcagctggccaaggggcttggcatctccatatttatcgtgggacatgtgacgaaggaagggacggtggcagggccccgcgtgctggaacatatggtggatacagtcctctattttgaaggggaccgccacgcatcctaccgtatcctgcgcggcgttaagaaccgtttcggctcaaccaacgagataggtgtatttgagatgcggcaggacggactgcaggaagttgccaatccgtcagaatatatgctgagcggccggccggaaaattcctccggttctgttgtagcctgttccatggaaggaacgagacctatcctcatagagatccaggctctggtctgccaaagtaacttcggtatgccgagacgtacggccgcaggcacggactacaaccgtgtaaacctgctgatggcagtgctggaaaaaagggctggcctgcacctgtccaattacgatgcctatgtaaatatcgcgggtggaattaagatgaatgagccggctatagatctgggcattattatggctctcatctccagttataaaaaccgtcctattgatgagaaaatgatcgtattcggagaggtaggactgagcggtgaagtgagggccgtcaatatgccggagcagagagtggctgaggcaaaaaagctcgggttcgagacgtgtgtgctgccggaagtgtcgcgagacctggtgaagggagtgaaaggcatccgccttgtcggggttaagacgataaatgaggtgttatcccttttatagttttatagaaatgaagaaattacaaaataagtgttgacaagaaacgacatgtttggtattctactatagctgtcgcttgagaaagcagtaggcaataacttgtttcgtatttaattgaaaaatgttgttgacaggagcttgaacaatgtgatagtatatatgagctgtcgctcgagagagcgtgaaagaaaaataaaaaagttgttgacaaatgacgacggatatgataaattatagaagttgtcgcttgcggcgacaaacagcaaagaaccttgataattaaacaatagacaacaaccctgaaaatttcttaaatagagaaaaattcagaacggacatcaaaaaagatgtcaacctaaaaaacagtaataacgggataggattagctagtagttaattctgaccgcgattaaactttaaagggaagctccagcagttctagcttcgtgggaaacctcagcaagaacatgtggagcgtctcaacactaaggcccgtgagataccggacctaagtttttaagacgagagtttgatcctggctcaggatgaacgctggcggcgtgcttaacacatgcaagtcgaacgaagcaatactgtgtgaagagattagcttgctaagcttggaactttgtattgactgagtggcggacgggtgagtaacgcgtgggcaacctgccttacacagggggataacagctagaaatggctgctaataccgcataagacctcagtaccgcatggtagaggggtaaaaactccggtggtgtaagatgggcccgcgtctgattaggtagttggtagggtaacggcctaccaagccgacgatcagtagccgacctgagagggtgaccggccacattgggactgagacacggcccaaactcctacgggaggcagcagtggggaatattgcacaatgggggaaaccctgatgcagcgacgccgcgtgaaggatgaagtatttcggtatgtaaacttctatcagcagggaagaagatgacggtacctgactaagaagccccggctaactacgtgccagcagccgcggtaatacgtagggggcaagcgttatccggatttactgggtgtaaagggagcgtagacggcatggcaagtctgaagtgaaagcccggggctcaaccccgggactgctttggaaactgtcaggctagagtgtcggagaggcaagtggaattcctagtgtagcggtgaaatgcgtagatattaggaggaacaccagtggcgaaggcggcttgctggacgatgactgacgttgaggctcgaaagcgtggggagcaaacaggattagataccctggtagtccacgccgtaaacgatgattactaggtgtcgggaagcaaagcttttcggtgccgcagccaacgcaataagtaatccacctggggagtacgttcgcaagaatgaaactcaaaggaattgacggggacccgcacaagcggtggagcatgtggtttaattcgaagcaacgcgaagaaccttacctgatcttgacatcccggtgacaaagtatgtaatgtactctttcttcggaacaccggtgacaggtggtgcatggttgtcgtcagctcgtgtcgtgagatgttgggttaagtcccgcaacgagcgcaacccttatctttagtagccagcatttaggatgggcactctagagagactgccagggataacctggaggaaggtggggatgacgtcaaatcatcatgccccttatgaccagggctacacacgtgctacaatggcgtaaacaaagggaagcgaccctgtgaaggcaagcaaatcccaaaaataacgtctcagttcggattgtagtctgcaactcgactacatgaagctggaatcgctagtaatcgcgaatcagaatgtcgcggtgaatacgttcccgggtcttgtacacaccgcccgtcacaccatgggagtcagtaacgcccgaagccggtgacctaaccgaaaggaaggagccgtcgaaggtgggaccgataactggggtgaagtcgtaacaaggtagccgtatcggaaggtgcggctggatcacctcctttctaaggaaaagaagaagtaggggttgttgtttattgtttagttttcaaggagtgagtgcgcagactggaagccagtcctgtgacgcaagcgggcttgcaggagcaggaatggaagacaggatgcataagaaggcttgagtctaccgagaaggaacgaagtggattcgaggtagaggaaagactgcactcacggagaacaactaaacgagcttttttaagccttcaaaagtttaaaaaggactgctggtggcgatgcgcctgggggaaacacccgtacccatcccgaacacgatggttaaggctcaggcggccgatggtactgcactggagacggtgtgggagagcaggtggctgccagcactaaaaaaagagcagatgcagaaccgctgcaaatgttcgggatttagataaatacaggcaaagatgagcaacaacttatcaccgccaacccagtcagcagggcagtgctgttcagataactggttttaccagtgattagataagaaaaaacttttttcttatgtaatgactgataaagattcagtctctatgtaccttgaaaattgcatacaaagaaataaagattaaatatcttatttaatcaagacatccgaggtaatgaaagacttactggacgttacgtccggtgagaaaacattatttatattcgagacaacgaatcaaaaaaacaaacctaagaaaccaacgcatatcacgctagatatgtgtagcgagggagacacacccgtatctcctgagcagttggtcatgctaaaaagagcatatggtggatgccttggcactaagagccgatgaaagacgtgataagctgcgaaaagcttcggggaggagcaaatatcctttgatccggagatatctgaatggggaaacccagctgaggaaacctcagctatccttacgccaatccataacgtaaggaagggaacccggtgaactgaaacatctaagtagccggaggaagagaaaacaacatgtgattccgcaagtagcggcgagcgaaaacggaagagcccaaaccagggtgcgtgcaccctggggttcggaccgcaggattgattcaggaagagtagcagaacggttttgggaaagccggccagagagggtgaaagccccgtaagcgaaagtctgactgacatggcggtatccagagtaccacgagacacgagaaaccttgtgggaacgcgcggggaccaccccgtaaggctaaatactccttagtgaccgatagcgcatagtactgtgaaggaaaggtgaaaaggaccccgggaggggagtgaaagagaacctgaaaccatatgtttacaagctgtggaacacccttatgcggtgaaccgcgtactttttgtagaacggtccggcgagttacgctggctggcaaggttaaagactgaaggtctggagccgaagggaaaccaagtcttaatagggcgaataagtcagtcagagtagacccgaaaccgggtgatctatccatgtccaggttgaagttgccgtaaaaggcaatggaggaccgaacccacatccgttgaaaagggtggggatgaggtgtggataggggagaaattccaatcgaacccggagatagctggttctcctcgaaatagctttagggctagcctcatacaagtcttgcggaggtagagcactgaatttcctagggggcgtcaaagcttaccgaagaatatcaaactccgaatgccgcgtagatgatgtatgggagtcagactgcacgagataagttgggtagtcgaaagggaaagagcccagacctgcagctaaggtcccaaaatgtgtgttaagtggaaaaggatgtgggatttcaaagacaactaggatgttggctcagaagcagccatacattcaaagagtgcgtaatagctcactagtcgagaggtcctgcgccgaaaatgtccggggctgaaacacactaccgaagctcagggatgtacgaagtacatcggtagaggagcattggatgcgggaagaagcagtaccgaaaggagctgtggactgcatcgaagagagaatgccggaatgagtagcgagaggaaggtgggaatccttccggccgaatatctaaggtttccagagtaaagctgatctgctctgggtaagtcggggcctaaggcgaggtcgaaagacgtagccgatggacaacaggttgagattcctgtaccacgatataacagaactgtggggacacgtgtggaaagcataagccgggaatggaaagaccggcgcaagcggggtaggcgtacatcaggcaaatccggtgtacaaaccaaatccgtgacgcgtaccgaacttaaagtagggaagtatgtgagccatgcgtcaagaaaagccgctatcgtttatatcgtgcccgtaccgtaaaccgacacaggtggatgaggagagaatcctaaggccgacgggagaagcattgttaaggaactcggcaaaatgactccgtaacttcgggagaaggagtgccagagagatctggccgcagagaattggcccaagcaactgtttagcaaaaacacaggtctatgcaaaaccgaaaggtgaagtatatgggctgacgcctgcccggtgctggaaggttaaggggagaggttagcgcaagcgaagctttgaacttaagccccagtaaacggcggccgtaactataacggtcctaaggtagcgaaattccttgtcgggtaagttccgacccgcacgaaaggcgtaatgatttgggcactgtctcaacaatgcacccggtgaaattgaaataccagtgaagatgctggttacctgcgccaggacggaaagaccccatggagctttactccagcttgatactgggattcggtattgcatgtacaggataggtgggaggcaaggaagtgatgacgccagtcgtcacagagccgctgttgggataccacccttgcagtattggatttctaaccatcagccgtgaaccggctgggggacaatgtcaggtggggagtttgactggggcggtcgcctccgaaagggtatcggaggcgctcaaaggtcctctcagaatggtcggaaaccattcgcagagtgcaaaggcaaaagagggcttgactgcgacaccgacgggtggagcaggtacgaaagtaggacttagtgatccggtggtataaagtgggattgccatcgctcaacggataaaagctaccctggggataacaggcttatcactcccaagagttcacatcgacggagtggtttggcacctcgatgtcggctcatcgcatcctggggctgaagtaggtcccaagggttgggctgttcgcccattaaagcggtacgcgagctgggttcagaacgtcgtgagacagttcggtccctatccggcgtgggcgtaggatatttgagaggagctgtccttagtacgagaggaccgggatggactggccgctggtgtatctgttgttctaccaagagcatggcagagtagccaagccgggacgggataaacgctgaaggcatctaagcgtgaagcccccctcaagatgagatatccctgcgcaagcagtaagaccccttgaagacgacgaggtagatagggcagaggtggaagtgcagcaatgtatggagctgactgctactaatcggtcgagggcatgaccaagagcgtagagagcgcggagtcaggaatgacggaggcgcgtctcgaagcgagaaggtggataggtaatggatgtaatatttatttcttgtatgcagttttgagggtacatgttaatatcgtggaagaacaatgcttatggcattgtttttttattatttgtaagcccggcaaaggacactgcacataatataatatacagttgaaatgaaaaatcagagaatgtataatagaaacagagcaacagtaaaggaggagcatatatgttagataaaaaagtagttgagctgatcaatgatcagataaataaggagttttattctgcatatctgtatcttgagttttctaatttttattttgatatgggacttgaaggatttggaaactggtataaggtacagacgcaggaagagagagaccatgcgatgctgatgatccagtatcttcagaataacggagaaaaagtagttttacagacggtagacaagccggatataccgcttggcgatgcaaagggtgtcctggaagaagggctgaagcatgaacgatatgtgacaggtctgatccacaacatttatgatgccgcgtattccgttaaggacttccgtacaatgcagtttttggactggtttgtgaaagaacagggagaggaagaaaaaagtgctgaggatctgatcaaaaggtttgagctgttcggggaggacgcaaagagtctctatatgctggacagtgaacttggaacaagaacttacacggcgccgtctctcgtactgtaagcggccggaacgtgtgcttactgattgacggatcacagcgtccttcagaacagtcaaatacagaacataaccgtcaggccaaaacagtctgacggttttttatattgcaataaaggaactgccaatctcttacatatatatggtataatatctgtaactatctgataagctggaaggtacgggaagctgtctggaatctgccggacaacgccgccgcaaaagtgatcgtggaagacgacagatatgtgctggcttaaaagatgtactgaggagggaaaaattatgaaaagaaaattattagtatttgggttattggtgtcgcttattctaacaatagttctggccgcggcggggtgcgggaaaaaggcaacgcctgagaatctgctggcagatgtcaacaagaatataaaagagatcaagtctgtgtcagccaatatgaatgttacagccgagatgtcggtggattctaagacagcaggcattgtcatggacatggacattgattcgacgagaaagccggcggcgacacatatggaaggaagtctgagcttcaaggcagatggttccgatatgagcacggacgtggaagtgtacgctgtagaggaggatgatgaactggcggcatatacgtacgcgagaggagaatggtctaagacaggcagcgataatgtagataacgcactggatgaaaatgtattcaaagcaatctcaaaagcccatgcgtcatttgaaaagaaagataagctcgttgaggtgaacggcaaggattgttttgaactggaggggaaggtaaaggggaaggtgctgaatgcggtgatcggggaaggcatgctgaactccttcgacccgtcaggcagtatgatcgacgacgaagaactcagtaagaagacgataccttgtacgatcgacatttataaggacaaggtccttccggccaaaatacacgttgatctcaaaaaggtagccgaagagatctatgcagatgcgtatgacaagctggaagttaaggaatattatgttgagatcaactatctcggatacgatgaagtggaaaaaataaaggtgccgaaagaggccagggaagcggcaggaggcagctcaccggactttgatgacaataccggcagtaaagagaaagggaacgggaaaaaggagagcagtccggccgggcagagcaaggagctgaaagacgaatggaacagctatacggtacaggtgaacgacaaggtactgacacttccgtgtaaaatagaagatctggaggcggccggtctgtctatggacacagttaataccccggaggattacattgtcaatgcaggtgaatacgaactcgccttctttgaagataataacggtaattccattatggttgacatggtcaatcagacagacagcgcctgcaaagtgagcgagtgtcttataggaggcatacaggcagataaatattcggttgaagccggagagctgtcggtcatattcccgggcggtatccagataggagatgatgaggcaaaggtactcagtaaatacggtgagacggatgatgaatacaagggtgagagcagcagtgactattcatggtatgacgatggaagtttcgagaacagatgccagataatagtggatgccaaagagaaaactgtgagtcagatgacactcatacggcatgaatagagagagaacggtacgctgaatgttaaaaaggtcctgtgcaggaggagtgcacaggacctttttgaaaccgttgcggttcactgcatgttgattagtagttttgcaccttattgtatatttctccgccttgtgttatagtgtgaatggaaaataaaatgctgtaaatgaatctttgtaaaggaggagaacatgaagatagcagtctgtgaagataatgtaaaggagcgggagctgctttgtgaacagataagaacggccatggaactcagggacgttaatgctgaggttgaaatatttgaaactgcagaggaacttctgaaggctgcggagaaaactttcttctccatgttctttctggacatacttctgccggggctttccggtatggatgctgcgctgaagctcaggagagcaggcaactattcaccggtagtattcactaccgttacaaaggactacctggcccagagctacagcgtatgggcggcgcattatctagtcaaacctattgaacagaaagatatggaagaggcattttcacgcgcgctcaagatgctggagggtacggaaagaaagctggaacttacggttgcccggcataccgagcagatcccttattcagaaatctattacgtagaaggaaacaaccggaacagtatcgtgcatacacgtaccggtacacatactccgtatacttctcttctgggaatcgttgagaagcttgatgacaagcggttcctgcactgccaccgcagatatgtcatcaatctggaccatgttcttgcggtacagcggagcaaggtcgccatgcgggatgatgtgctgctgcccatccgaaggggggaagcggaacaggtccgccgcgcatgggaggacaggagatttgagatcgtgaacgggagagactgatgcctgcagtgaatccgcatcataagccggtcatacacaatggagctgctgctttggcagagttgtttctctgctttatgcggcagctccatgctgtctgttcctcactgtccggaaggatcatttcttaatcaaacggtacgtgttccacgttgtcaagaccgatgttgcgaaatacatcgtcccagcaggagaatccctcgggaatacggtaccacggttctgcggctttgatgccgataatggcaagttccatgccgatttccagttcatcgtttgtgatgccttctccccgttccagatggatcataccgatagaatcgggggcggtcaagagtaattttccggtggaatcctcccggagcgccagattttcattctggactaggagtgtgtatgtcccgtttccggtgtccacagtcgttctgccgaaatcgaatccgtcccggcacacccattccttttccgaaattttccccttacataagaatttgccgtcaattactttcagcacctcctccacaggatctgtccggtctgccttcgcccgcagcagtgcttttcccgtctcctgcaggcttgccgccgaaccggccaccagacattccctgcagcctgctttatcaagcggcgggaggcagtacgcgatcagaatgttattgtaggcgaccacaatgcttcttccgatcagctccatcgcggcagtatcatacggatccggtgtctcgatgaccacgctttccccgtaaatggatgcgtacacaaggggactgaccggatgtctgtacacacacgttaatatattgctgagcgtcgggaccgaccggccgcacgagtctgcatttaaaagaggcaggcctgcctgcgaggcaaccttaagaaaatagggcagctggatacagtcgtgttccagcgtatacagatatcctatcttttttccctttgcctccatcagttcctgcattttacgcagcgcgatcataccatctctggagtcgtggcagaccgctgcgtctgtagagacagggcccagttttcctactgttacggcatagagatcttcgtccatctcatctacgtcgaccagttcgatctcaattggtttttccctgtcgatccgttcgatctcctcaagcgcacagcgcagggggtagtcgcccccgtcgcttctgagcacggctccgtgacacatttcaataaaatcctgtttatgcagtatacgtgacataagtttttcctccttaaattaaacaatatcgcgccggggttcttttcggtccgtcagtttcattgccgcatagtaaagtacgccggatacgacaatgccgtttatggtagcaaagccgaatgggagaaacagcgccgccagcactccgcagacgagacatacaataccggtccagtgaaagccgggccgttcttcccaattttccaccttaccgcgctttaagatccagtaatcggtgatcatgacacctgctaccggtgggatacagcctgccatcagatccagaaaatttgtaaaatagttcatgataccaaacacagcgagtaaaatacctacgattcctgcgatcgcagttgcggccgcacgcctctttccggacagatgcagcagacttgtgatcgccaggccgccggtgtaagcgtcgcaggccattgttgtccacgtggcaagaacaagaataagcagaccaatgaccggcaggcccagcttggcgatcagaatggagatgtcagattctccggtcgccgcccccatgatagaaccggcgataaagaggaagagacaataggggatgatacctacgacagcggcaagacaggagcttttcctgtcccggcagaaccggtggtaatcaggcgagatcgtactgccgaccgcctgcatgccgaataccatggcgactccctccgcaagactgacaggctccaccggggaggatctgaccagatccagaaaggatatgtcctgcagacatgtaacaatgccgtatatacagagcagaataagcgcgggaacggctattatgttaagcttcgagatgatcttctctccgagaatagagacggtcagcatgataatgccgagaatgataatggtggcctcccggttccagtgaatgttattcaaagtcagtatctggataaaggactctcccgcgatctggcagtcgctgcctgtccagcatataagggtcgtggccagtataaaagaaataatgatgccggccccttcccgtccgaatgcggagcgggccagtacgacggtgggaagtccggtgtcagttccctccatgccctgcaggcagaatacgatcgataaaagtacggtgccgatgatcacggcgaggatcatttccataaaggaaagacctttgatcatcagagctcctaccatgatcgtcggtacacagatagagcttccggcccagataaaagatgttttccaccagccgtggcgttctccgggcggtacaggcttgaaagcatcttcctcgaataaagagtttttttcttgttcactgttcattgctaaaacctcctgtctttgtattataaagcttcatctatcaaaagcaggcgggatccgccgcttagacacttgttcgtatccgtaggccgccgtcagaatctttccttcctggaacgcgcctgcgtaaaaggatatgccggccggaacgccgcttcgtgacaatcccatggggaccgttatggaaggataacctgtaatggccggcaggttggaataacagggactcgttatcacatccagttcatattggctcagacaggtgtcgagcgcggcctgtccttcttctatggcccggaatttctgactccagtagctgctctccacgagacgtcccgtcgtctgttcctgcgccagaagcagcagatcctgtccatacctcagcgcggtctttgcatggcgctgattatacgcgatgatgtcggcaagggaacggcattgtccggccgcgtagcgagagagataaaagttgagcgctgttttaaattcatacagcatagttgcctgtcctaagataccgctatccattcccgtaaacgcaatgtcgcagtccacaagctctgcgcctgcctgctgcataagcagcagttccttctcaaacatgtcgtcactgtcttcgggaaacgattccttatcacagcggacccggttgacgccgatccgcatgccgcggaaatcttccggttttaaaaacacggtgtaatctttctgtatcagatgttctgtgcacccggttgcggcgtcgtccgcgtccggccctgtcgtcattgcgctgagcaatattgcacagtctgtgacggtccgcgccatgggacccgccgtgtcctggccgcagatcgggatgatgccggagcggcttacgagtccgacggtcggttttaggccgcagattccgctgaatatggagggataggtgatggagcccgcggtctctgtcccgacggcggcgctgcagaagcagcctgcagccgcagcggcggacccggaactggagccggagaccggaaaggaagcgtcatagggattcttcacctgaccgcagcgggaggagtacccgtccggaaattcctgggcgatataccgggcgaattccgaaaggttcgccttgccgaggatcacggcgcctgccttcctaagctgcttcacaaggggggcgtcctttctggcaaaattatcggccagcgcctcggagcctgccgttgtatgcattttgtctcctgtactgatattatcttttaacaggaccgggattccgtggagcggtcctctgggcccccgcagcatacgttcccggtcgagggcttccgccgtaaagatggcgtccggatttaattcggctacagcgttgatctttggtccgttctggtcatactgctgaatacgcttcagatacgctgccgtcagttcctttgaactcagatttccaaggctcatctgttcctgctgacaggaaatgctctcttttgttacatccattttttccctcctgtaagcgttctgtcagatacaaaatagaatatatttatttagttatattattattatataacaaataaaaagtcaaacgaggacatgtatcatgaaaagaaatagttgcgttataaaatttcttttcaagaaacactacgggcagacggaatacagcaataagtcttgcattttgaaaaactgcaaaaaatatattctggcgaaactttgtgttgattttaacttacatgtgcattatactgtggaaaatggatagtgcacgatatctcagagactgccggtgtgagggggcgatggcgatggacagagtgaaacaggtaggagaacgtatacgattttatcggaaacaggagaaaatgacactggaaatgctggccgcgaagatgaacaagagtaaggccaccatctccaaatatgagaacggaacaattgttatggacatcgggacattgtatgattttgccgatgtctttcgtattccggtttattgtctgatcgacgatacgcgtaaggagacaggggtacacggacacatgcctttctcctcctcgatcctgtacttttatatatttaaggggagcggaaaccgggagatcgcggagtcctatctgagcctcgcggaaaaggacggggaatgtcaggtgacgctttattacgggggactcccggataaacggaacaaatcctgtcttgtgtatatcgggaagggatgcggcacagacacgaccttttcatttatggtaacgaattaccaaaatcccctggaccagatgtattttaccgccagtctgccgtatataaactggaacggctatctggccggcttctgggtgggccttacctttgagggggttacgcctatctgtatgaaggcagtcatttcagagacgtccatggaagacagggagacgctgaggaagcttctcaccgtgactaacgcggaattaaattattttaaaaagcatgacaagttcctgcttcggagcgaagattaaggagctgtgcgccccagctttgatattcagccggggcgcacagctcctttcatgatcataaaggtattcgcagcttcagcggatccgcttgaggatctcgtccagaagacacatggctacatcctctttgtccatgacacccagctctgtctgggtatccggcgttataaaggtgactacgtttgtgttgccggcaaaaccggccccctcttctttcaggttgtttgccacgatcatgtccagatgtttgtttatcagtttcttccgggaattttcgatcatatgctccgtctccatggagaagccacagagaaactggcccgggaccttgtgctctccgaggtatttcagtatatcgtcggtgcgctccagggcaagggacatctcactatccgctttctttactttttcatcgcttacgtgggcgggccggtagtcggccacagccgcagcctttatgatgatgtccttatcctggctgttggaagtcactgcatggaacatatccatggcggagatgaccggtatggtatttacgaacaatggcggatccagcgcagtctgtccggagacgagcgtaacatccgctccgcggagcatgcacattctggcaatactgtagcccatcctgccggaagaatggtttgtgatgaatctcaccgggtctattgcttcctgggtgggcccggccgtgacgaggactttaagtcctgccatgtctttcggaagcgcacagcttttgagcacatactgaagcagtatatcaggttccggcatttttccgcttccggtatctccgcaggcgagccgcccgctggcgggagatatgacttccatcccgaatttctcaagcagcttcaggttctcctgcgtcaccgggttctcatacatgcgtgtgttcatggcaggagctatgatctttggacactggcaggcgaggacagtcgttgtaagcatgtcatctgcaagtccgtgggcaagcctggcgatgacgtttgccgtggcgggcgcgatgatgacagaatccgctttcttggccagcgctacatgctctacattgaactcaaagttccggtcaaatgtgtctgtgatacacttgttgccggtcagcgtttcaaatgtgacggggttgatgaaattccgggcatgttctgtcatgagtacgtgcacctctgcacctgatttcacaagccggcttgcaaggcaggcgcttttatatgcggcgatccctccggagacgccgagcagtatagtttttccttttaacagcataatatgatcctttctgtacgtgcgttattttcatctgtcattactgtcgatctcttatctttacagtaacaaatgtggctgaaaaatgcaagggacacacgggagagggcggtacggatgtatggaatttaatacttgctgacaaagtaccggcaatgctataattatactgtaattgtattgtatctccctcagaggagaatgataacaaggaggaattgaataatgaaagaaagaaaacatgacactcgttggatggtcagtgttgcacttatggcggctattgtcatcgtgctggcgaatacaccgctcggcatgatccagcttccgattattaaggcgacaactgtgcacattccggtaataatcggagctgttttactcgggcccggagcaggcgcggtgttaggcggtgtgtttgggatctgctctctggtgagcaatacgatggcgccgacactgctgtcgtttgcgttttccccgtttatgagcaccactggtctggcaggggcggcaaaggcggtatggatatctgtaggatgccgtatcctcattggcgttgcggcaggatggctctggatcttgctgaccagactgaaagtcaatcagctgatcgcgctgcctatcgttggatttatcggctctcttgtgaatacggtgacagttatgggcagtatatatgtattatttgcccagcagtatgcggatgcaaagcaggtcgggatcacggccgtgtgggggcttatcatggggacagtcaccgcgtcgggcattccggaggcggctgcggctgcgatacttgtgctggcgcttggaaaggtgctgatacaggtgacgaagaaaatgaacttcgggacgatcagcgcgcaggcagtccggtagtgcagtgtgacagagcgggacgttttaaaagatagaaaatagcaacagaaaagcggtaagccgtgtatcagatcaagatggtacacggctttctttttctgccggaacacacggccgctctggggtgtcttcccggacattgagaccggtttcgacttgtattaaagacgcggagggcttacaatataatcagcataccgaagagtttagaagagggaaaattatggctgctgataatatatttgcaaatgaattgatgaaaaatattctgaaccgtttatacactaatatttttgtgacagatgcagagacggacgagatcatctatatgaacgatgtaatgaaggaaacatttgggctggaacatccggaagggcatccgtgctggcaggtgctgcagaaggatatgaaggcaagatgcggtttctgcaggatcggcgaacttctcggtgagaaggacaggaagctgtgtatatgggatgaaaagaatgtgctctccggccgtgtttacagaaactacgacagtctgatcgagcttggggggaagacgtaccatatacagaattctatggatatcacgaaccgcatgacattttcggatacagccaacattgatgagctgacggagttatggaacagaagggccgggaaagagaaactgcgccagcttctggaacaggcgaagaaagaaaaaaagacgacggtcgtcgcattgtttgatatcaatgagctgaagtcggtaaacgatcgattcggtcatctggaaggagaccggttcctgcgttacgcggcaacggcggtccgggaagtgctgagggagaaagaccttgccttacggctgagcggagatgagttcgtagtggccttttatgccgaaagcagtgaagaagcggacgcaaacatgcgcaggatacaggacgggctgaaagagatggaaaagcagtacggactatcctaccggatgggcttcagctatggtctgatggaagtctatccggaagacagctatactgtcacgcagatcattgcgaaggcagacagccagatgtacatacaaaagcggcggtatcatatagagcaggcaaaacagaggctgcgggacatagattatggcagagataccgtatttcagtatgacaaggaccatctgtacacggcgttgacagcgagcacagatgattatatatttgtaggcaacatgaagacgggagtctttatgtatccgcccgccatggtcagggaattcggccttccggggccggtattggaaaatgcggcggccttctggggggaattgatacaccctcatgacgaaagcagatttctggagagtaatcaggagatcgcggacggaaggacggagtaccacaatatagaataccgggcccgcaatgtgcgcggagagtggatatggctgcgctgcagggggaaaatggtaagagatgtccaggggatgccggagctttttgccggttttatcaccaatctcggcaggagagaacagatagaccatatgaccgggctttacaacaggtttaagttcgagggagccgtaaagaaacatcttgtcagcaggacagtgagtcatatgggaatcatgatactggacatggatacgttcaaggatatcaatgacctgtacaaccgttcattcggggacgagatccttcgcatgacggctgagaagatccggtctgtgctgccggaaaatgcctcggcttacagactggacggagatgagttcggcatagtgctgctgaacggggagaagaaagcgtatgataagctttacacggatatacaagaagagcttgagcggcagaaggagtggaacggacggaagtaccactgcaccgtctccgcaggttatgcagtgtacccggaagatgcggataattatctcgatctgataaaatattcggactatgcgctggaagaatctaagcggcaggggaaaaaccggctcactgtctttacgcgggatattattttcgagaggacgcggagactcaagctgacggaacttttgagagagtgtgtcgggagaggctttgcgggatttgacgtctattaccagccacaggtggaatcggccacgggcagactgtacggggcagaggcgctggccaggtggaactgtcccgattatggaaatatatcaccggttgaatttattccgcttctggaaaaaagcggtctgatcgtcgagttcggcagatgggtgttcaggcaggcggtgctccagtgccgtgaatggaggaagcgctgtcctgattttaatatcagtatcaacttgtcttatgtgcaggtcatacaggatgatgttgtgggctttgtcgagtcggtcctctctgagacagggctgaagccgcaggccgtgacgctggaactgacggaatcttatctggcgaaagaggataagcttgtaaaggattgtatggaaagcctgaaagaccaggggctgctgatcgccatggacgattttggaagcggctattcatctttgaagtcgcttaagacgataccggccaatattgtgaagatcgaccgggaatttacggcgggcatcacctcagatgcgtttaacatgtccttcatccgggccataacagaattgtgccacaaggtgggcaaaacggtctgcctggagggggttgagacggaggaagaataccgtatggtaagcggcagcggccttgagctgatacaggggtattatttcggaaagccggtcaaggcagaagaatttcccattgcatgaaagagtcatatatgataaaatgttgacttacaaggtgtgaatgactagactcatttgcaccttttttaacgcggtaaacatacataagtgaaaggagatatattttgttttcggtaaaccaatatgttaaggcaaaatcgctgaaagaagcgtatgagctgaatcaggcgcggaacagccgtgtcatgggcggtatgatgtggatgcggctcacaaatgcaagagtacagacgataatcgatttatccggactcggactggacgagatagaagagacagaccacgtatttaagataggcgccatgtgtacgctgcgtacgctggagcagcatgaaggtatcagggagatgtacggcggcgccgtcgcggaggcgctgcgccacatagtaggagttcagttccgcaatcaggccacggtgggagggagcatttacgggagatatggtttctcggatgtcctcacgtgcctgctggcgctcgacacatttgtggagctgtataacggcgggacgatacggctctcagaatttgtaagccacaggccggacaacgacattttagtgtccgttatcatccgaaagcgtgagcggaagctgcgctatgcgtccgtgcgcaggacggccactgattttcccgtgctttcgtgcgccgtggtgacgggacttctgcacggggaagaatactggtatgtctcggtaggggcaaggccgatgcgggcgtcactgctcgagaaggcatggaagatatccggcggcacgtccgaggagcagatagcggcgtacgcaaaagaggcggccgcgcagttttcctatgggagcaacatgagaggaagtgcacaataccgcagacagttggccgagattttgatccggcgggcggtcacatcgattgtaacggaggatgaaaaggaatgatagtacagtttacgttaaatggaaaagaggcggaagcggatatccggccggatgccattcttctggacgtgttgagagagcttggatgcagcagtgtgaaatgcggatgtgagacgacaaactgcgggctttgtacggtctggatcgacggtgtttcaagactttcctgttcggtgctggctgcgtctgttgaaggacgtaagatcaccacgctggaaggcgttgggaaagaagcggaggagtttggggcgtttctggccgcggaaggggcggagcagtgcggatactgttctcccggttttattatgaatgtgcttgcgatggtgagggagctcagcgatccttccatcgatgagataaaggaatacctgtccggcaatctgtgccgctgcaccggttatatgggtcagctgcgggcaatacagaagtatctgaaggcgagagaggagggacgggcatgcgtgtagtgaaccaatctgtgcgtaaagtagatcataaggcgcttgtcaccggcaaggctgtgtataccgatgacctggccccgaaggaatgcctcatcgtgaaggtgctgagaagtccccacgcccacgcgcttatcaaagagatcgatctggaaaaggcagataaagttccggggatcgagtgtattcttacttatgaggactgtccggacaagcgttttacaatggcggggcagacatatcccgaaccaagcccgtacgaccggctcattcttgacagaagagtgcggttcgcaggtgacgctgtggctatagtggcaggctgtacgaaggatgccgtagacagggcgctcaggcttatcaaggtaaagtatgaagtgctggagcctgtgcttgatttcaggacggcaaaggacaatggtattctcgtacatccggaggataactggaaaagcctctgcccggtgggcgcggacaataagaggaatctctgcgccagtgatgtgtgcgcggacggagatgtggacagtgtgctggacggatgtgaatatgtcgtggaccagacttaccacacacaggccaatcagcagtccatgatggagacgttccgcacgtatacttatatcgatgcctacgggaggctgaacgtagtctcctctacgcagatcccgttccatgtaagaagaattctggccaatgcccttgatatcccgaagtccaggatacgcgtcatcaagcctaggatcggcggcgggttcggggcgaaacagaccgttgtctcggaagtgtacccggcgcttgtgacgtgggtgactggaaaaccgtccaagatgatatttacgagggaagaatcgctcaccgcctcttccccgcggcatgagatggaagtccgtgtgcggatcggagcggataaggacgggttcattaaagcaatcgacgtctatacactctccaatacaggggcctacggcgaacacgggccgactacggtagggctgtccgggcataaatccattccgctttacggaaaggcggaggcgttccgatttgcctatgacgtagtatatacgaatgtgatgtccgccggggcatacagagggtacggcgccacacagggaatctttgcggtcgagtccgcggtggatgagctggcggcaaagatgggcgaggacccggctgcgctcagggagaagaacatggtgagggaagggcaggtcatgcccgcgtactatggtgaaaaggcggaaagctgcgcgctggaccgctgtcttgagcgggcgaaggagatgatcggctgggacaggaaatacccgcgccgtgacatggggaacgggaaggtgcgaggtgtcggcgctgcgcttgccatgcagggatccggcatatcaggcgtcgatacggcctctgtcggcatcaaagtaaatgacgacggattctacagccttatgatcggcgccaccgatatggggaccggctgtgatacgatcctcgcgcagatggcagcagaatgtctcgactgcagcatggaggagatcatcgttcacggcgtggatactgacgcctccccttatgacaccggctcctacgcgtccagtacgacctatgtgaccggcatggctgtcgtgcgcacgtgcgagacgctgagagacctcatacgggagaaaggtgcgcagtatctcggctgcgacgcggacgatacggaatttgacggagagaacgtgatcgatctgaagaccggtgagatgatctcgcgtgccgacataggcaaccgtgtaatgtgcagcaaccagaacgcactgtacgccagcgaggcgttttcctcccctgtgtcccctccgccgtttatggccgggatcgccgaggtggaagtagacaaagagaccgggcaggtagaactgcttgactatgtggctgtggtagactgcggtactgtggtgaacccggcgcttgcccgcgtacagacagagggcgggctggcacaggggatcggcatggcgctctatgaggaagtcgtctatggaagccagggaaagaattacagtaattccttcatgcagtataagataccgacccgcctggatgtgggaaacatacgggtagagtttgagagcagctacgagccgaccggtccgttcggggcaaaatccatcggtgagatcgtgatcaacacaccatcgccggccatcgccaacgcggtgtataacgcggtgggagtccggatacgggaactgcccataacggcagagaaaatatactggggaatgcattaattttgaaaggggtcagaccccctcatatgaaaggggtctgacccctttcaaaattcctggtattatctgacgattcttgcttatgacacggtatttactgaatgttcatgtgcctgcgggcgagccgccagagcaggtgaaatacagctgcgccggccaggattgcggccatatagacgaagataccggcggtgttcccgagggatgccgctatatctttaaagatgacctgggtcatataatagtgcgggctgatatagaacatgttgatcgcgccgaagcggtaaaacagcatatttaatatcgtagctatgatacacgcgccgccgtagagggcggtacatctgccgtaatctctccacgggcagccgccttccacggcaagtccggcggtcaggccgagcagtatgagaaggatgtgccaggtgaaggagtgtacggtgaggggcggataagggtagtggagcccgctcgtgtcaaagaatgtaaaaatgccgccgagcagcccgaagtccatgaggaaggtgagcagaaccttcctaagccggacagacgttgtccacggcagaataaggcagatgtacatcggaatgctgcacagctggaacggaaaataccaccagtaatagtggccgctgtttacgataaaggtcagacaaagctgtttccagatctcactggccgccattgcaagtccgcatatgagaaatatgcggttgagatggagacggatgtattttatcaaaatagtcacctctgatcagtcatatgttctgtctattattatacgccgttttcgtcagggaaaacagatgtaatttctctggcgttatgctataataccattgttgtctgcaggagaaatatctgcaggagaaaaatgaaaagaacgaaagcggagtgagagaagatgagaccaaaaaatgcgttcatgttgattttgacggcctttatatgggggacggctttcgttgcccaaagcgttgggatggattacctcgggccttttacttttaacggggtgcgcagctttatcggcggcgcggcgcttctgccgtgtatatttcttttggagagatttaatgaaaagaacagcagtgcggcgccggttaagggaagcaggaaagatctgatcgccggcggcacactatgcggtctgctgctttttgcagccagcagtctgcagcagcttgggatccagtatacgactgcgggaaaggccggttttatcaccgcgttttatatagtgatcgtgcctgtgctcggaatctttctcaggaagaaaacaggaatcaaagtttggacagcagtattgatagcattgaccggcctgtattttttatgcattacggagacatttaccataggaaaaggagatgtgctgttattcttcggcgcgcttatattttctgtgcacattcttgtgatcgattattattcgccgagggtagaaggggtaaagatggcgtgtattcagttctttgtgtgcggagcggcctcccttgtgccgatgtttgcgcttgagacaccgaaggcagcggatatggcggaaggctggctgcctcttctttatgccggcgtcctgtcgtgcggcgtggcctacaccttacagatcatagggcagaaaaatgtaaatccggccattgcctctctgatcctgagtctggaatcttgtttctccgtacttgcagggtggatcatacttggagagacgctctccgtgagagagtctgtcgggtgcgtgctcatgtttgcggccatcgtactggcgcagctgccggacaagaagaaggaggaagtgcagtatggataatgaattattgatgaagatgacagagtattatgcaggacagcccaaccgtatccagcattttatgaaagtgtatgcatactcccgtatgctcggggagatggaggggctggacagccgtacgcagcacatactggaagcggcggcagcagtgcatgacatcggcatccgaaggagcgaggaactgtacggggactgcagcgggaagcatcaggaggagcttggacctgaggaagcggaaaagatgctcacagggcttggttacggcagagaactgacagagcgcgtctgcttcctggtcggccgccatcatacgtatacggacatagacggaatggatcatcagatactggtagaagctgattttctcgtgaacctgtttgaaaatgaagacgggatcaacaaaaaggccgtggaaaacgcactggagcgcatttttgttacgaagagtggaaaagcggtattgaagaccatgtttctggcagagtgaaaggagaagaaaagatgagatttgtaatacagagagtatcagagagcactgtaaaagttgacggagaagttatcggacagattggaaaaggatttatggtactgataggggtgtctgacagcgatacgaaagagacggccgacaagatggtcaggaagatgctcgggcttcgtatctttgaggatgagcagggcaagacgaatctgtcgcttgatacggtcggcggcgggctgctgctcatatcccagtttacgctgtacgcaaactgcaaaaagggcaaccggccaagcttcatcgaagcgggcggtcctgagatggcggaggaaatgtatcaatacattatagacaggtgcagtgaacaggtggaagtggtggaacacgggaggttcgggacagatatgaaagtaagcctcacaaacgacggaccgtttacgatcatattagattcagaccagttgtaaggataaaatgggacgcagtcttttgaaaggactgcgtcccatttttgtcaagacttgtgacctcatatagaacataattagatttttaatgaattatttgtgaaaaatattagataattattaaataagtataaatatgttgacttttatagtgaatatgaataatatatttgttagatttctaattatctgggaggaggtgcgaaatgaatgaaaataaggataatgtaccggtatatgtgattttgcatcgtttgatccatatgagtaaatatcaggcgtttaagcgtctggatgattttgatctgaagccgagccaggcggggatactgtttgtgctgtcctgcaacggtaagctttcccagcgggagctggctgagaagatagggatcacccctccgtctatgacagttgcgctgcgcaagatggaaaaccgtggttacattaaaaaagaaccggacgaaaaagaccagcggatcataaggatattgctcacagaaaagggtgaagactgtgtggaggacataagagctgtggtggataagatggaggcagtcctctaccggaacatgacgcaggaggagaaaatgctgctgaggaggcttctgctccagatgcaggagaatcttcttgattccaaagaattcaagggtatggatatggcgctcatcatggaacgtacacgtcctacattaaaagacagattataaacacgaaaggaaaggcattatatgagtaaactgttaaaatttttaaaaccttatgccggcgcggtcctggccattctatgtgtgctcatcgttcaggcatattgcgatctgtcgctgccgacctacacttctgaaattgtaaatgtaggtatccagcagggcggtatcagtgagacgataccggaggagatcggagaaaaggatcttgataagctgctgctgtttgtggcatctgacagacaggataccgtcagagacgcatatgaagtaagcaaaaaggaatacgactacgacggaaaagtatatacgttgaaaaaatcggtcagagatgacgaaaagaagcttgagaagcttaccgggattctggggaaaccgatgcttcttgtaagcggttttgagtccggcagtgatatgacgaagaaaatgcaggatgagatgaagtcccagatgcagagtcagatgcaggcccaggtcgaggcgcaggtaaatgagcagatagaggcgcagacagcagggcagaatctgccggaagaggcaaaagagcagatgaagcagcaggcattagagcaggccaagtcacagcttccggatgtgggcagcatgtccgtatttgaaatgtttgaaaatatggaaccagagcagagagatgaggcggtcgcacagatcgagaagaacatggtatccatgccggagacgatggtggaacaggcagccgcgtcctatattaaaacagcatacggcaatctgggcataaacatggataacatacagaatcattatgtattatataccggcgggaaaatgcttgcgcttgcggcgcttggaatgcttgcaagcatacttgtaggcctgctggcttcaagagtgggcgcgtcggtagggcgcgggctccgcggagatgtatttaagaaggtagtcgggttctccaacggagagttcgacaaattctctaccgcctctcttatcacgagaagcacgaacgacatccagcagatacagatgctgtcagtcatgatactgcgtatggttttatacgcgccgatcatggcggtcggaggcatatggaaagtatttaacacaaatgcagatatgtcgtggatcatcgctctggcggtcggtttgatcctctgtgttgttgtcacgctgtttgtcgttgttatgccgaaatttaagatagtgcagagccttgttgaccgtctgaaccttgtatcgagggaaatcctgaccggccttccggtcatccgggctttcagtacagaaaagtatgaggaaaagcgttttgataaagcaaatatggatctgacgcgggtcaatctgtttgtcaacagagccatgacatttatgatgccgacgatgatgctcatcatgaacggcatcactgtactcatcgtctggtccggagcgcacaacgtcaacgacggcacgatgcaggtcggagatatgatggcatttatccagtacacaatgcagatcatcatgtccttcctgatgatatgcatgatatctgtcatgcttcccagagcggcagtatccgcggtgcgtgtggatgaagtgctcagaagcagcacgctcattcatgacccggagaatccggaagcacttccgcaggacggcaaaggggaggttacatttgaccatgtatcgttccggtatccgggagcggaggaggatgtgctgcacaaccttacatttacggcgaagccgggagagacgaccgccattatcggcagtacgggcagcggaaagacgacgctcgtaaatctcataccgaggttctatgatgtgacggagggacaggtgcttgtggacgggaaagatgtgcgcagcatctcgcagcatgagcttcgcggacagctcggttttgtgccgcagaagggtattctgttttccggcgatattgcctccaatatcatgtacggcaacccgggcggcagtgaggaagaaatgcgtgaggccgcgcagattgctcaggcggcagaatttatagacaacaaaaagaagaaatacgaaagtccgatctcccagggcggagcaaatgtttccggtggccagaaacagagactttctatcgcgagggcaattgcaaaacatccgaaagtatatatttttgacgacagtttctcagcgctcgattacaagacagatgtgaagctcaggaatgcattgaaagagaagacggcggagagtacagtgatcatcgttgcgcagcggatcagcacgatactgcacgcggagcagatcattgtgcttgatgacggggtgatcgcagggatcggcacacacaaagagctgcttaagaactgtgacgcatactatcagatcgcgtcttcacagatgtcggagaaagaactgagtgaagatatgaaggaggtgggctaatatggcagaaacaggacagaccggaagacgccgcggacctatgggcggtccccacggcgcggcgatggcaggagagaaagcccgggactttaaaggaactatgaagaagctcatgaactatatgggcaaatataagatcgccatattctttgtcttcatatttgccatcggagggaccatattcaatattctgggacctaagatcctcgggaaggcgacgacagagatatttaacggactggtaggtaaggtgtccggtggaagcggtattgattttaccagggtggcggaaatactcatcaccgtgctctgcctctacgtggtcagcgcagccttttcatttatccagggctacatcatgacggggatatcacagaagatgacgtaccgtctgagaaaagagatatcagagaagataaaccgtatgccgatgaactattttgacaaaatgacacacggtgagatcctttccagaataacgaacgatatagatacactcgggcagagtctgaaccagagtgcgacgcaggtcatcacttctgtgacgacgatcatcggtgtgcttgtgatgatgctcagtatcagcccgctcatgacgctcatagcgctgctcatacttccaatctccatgggacttatttccgccatcgtgaagcgttcccagaaatactttaagagtcagcaggaatatctggggcatatcaacggccaggtggaggaagtgtacggaggacataatatcgtcaaagtattcaacaaagaaggcgacgttatcgatacgttcgacgagacgaatgaaatattgtaccagtcggcgtggaaatcacagtttctttccggtatgatgatgccggtgatgcagtttgtcgggaatctcggttatgttggcgtgaccattcttggcggatatctggcgatcaagaagacgatagaggtcggagatatccagtcctttatccagtatgtgcgcagtttcacacagccgatccagcaggtggcgcaggtggcaaatatgctgcagtccacggcagcagcgtcagagcgtgtgtttgcgttcctcgaagagcaggaagaagaccagaccgtgtctgatccggtctctgtggacggcctggacggaagggttgaatttgatcacgtacacttcgggtataatccggaccatacgataatcaacgatttcagcgccaggatagagccgggacagaagatcgcgatcgtagggccgaccggggcaggaaagacgacaatggtcaagctgctcatgagattttatgacgtgaacagcggctccatcaaggtggacggacatgacatccgcgatttcaacagaagcgagctgcgccagatgttcggaatggtactccaggatacatggctgttcaagggcagcatagaagacaacatccgctacggaagattagacgccagccatgaggaagtggtggaagcagccaaggcggcccatgtacaccggtttgtccagacacttccaaacggatatgaaatggaactgaacgaggaggcaagcaacgtgtcccagggacagaagcagcttctcactatcgcgcgggcgatccttgcagatccgaaaatactcattcttgacgaagcgacaagctccgtagatacaagaacagaagtcaggatacagaaagcgatggataacctgatgaagggcagaacgagctttatcatcgcacaccggctgtcgaccatccgggacgcagacctgattctcgtcatgaaagacggcgatatcatagagcaggggaaccacgaagaactgctcgcccagaacggcttctacgccgaactttacaattcacagtttgaaagaagcgcatagggacagggcaaaacccaaatggggacggaggttttttaaaaaacctccgtccccatttgggttttgccctgtccctatttacgtctgtatttttttggcgtatacttgcaatatagtacgggtgaaaggagaagcaaaatgaagcttcgtgttttgattgacaacaatacatatattgaccagtattttctcggggaaccggcgctgtcatactatatcgagtcgggagacaagagaatcctgtttgacaccggatattcggatgcttttatgtataatgcgcggaagatggggatagatctgggaaatctgacgcacatcatcctgtctcacggtcacaacgatcatacaggcggcctggcttatctgaaggaggaatttgatctgaaggagacagaactgatcgcacatccggcctgctttaatgagaaaaaggcgccggagggaaatatcggcgcacctgtgacggaaaatgagatgaggagtctctgccggcttaacctgaagaaggagcctttctgggtggacgaggagatggtgttcctcggagagattcaggaaaggctgccgtttgagaagcgtaaatgtatgggacagtgcagagacggcggcagctgggaagcggatcatgtgacggaagattccgcggccgtatttaagacccctaaagggctctttatcgttacaggctgttcacacagcggtatctgcaatatcatagaacaggcgaaagacgtatgcagatgcgggcgggtcgccggcgtcatcggagggtttcatctttttaatgtcgatgaaaggctggaggatacgatacgatatctcagacagacagatgctgaaatgctgtacccgtgtcattgcgtctcctttgccgtgaaggcaaagatgaatgagaccatgccggtccgcgaggtggggacgggaatgacgatagagctgtaaacggcagtctggtcaaaatgaagaaagtaaaatggaggaagagaaaatggatcggctggatcagcagtttgaatttataagggaaattgacaaggagaaatttatcggcaggcagacctatctttctgacggtttgaggaaggaaaatgatgcggaacatgcatggcatatggcggtcatgacactgctcttaagcgagtatgccaacgacgagatagatgtgctcaagacgatatccatgctgctcatccatgatatcgtagagattgatgcgggagatacatatgcgtatgatgaggaggcaaagtcaacgcaggaagcaagggagcagaaagcagccgagagaatcttcgggcttttgccggaggaccagggaaggaaaatgaaaagtctctgggaggagtttgaggagcgaaagacgccggaagcccggtttgcccggacaatggacaatatccagccggtgatgcttaacgcggccactgacgggaaggcgtggcgggaacacaaggtcaggctggagcagataatgaagcggaatgaatgcacccggacgggatcggaacaattgtgggagtatgcccggagcgaatttatagagccgaacgtggaaaagggtaatataggcacgaaatgaattgtatatagagaaatgaaaaacagccggatatgttccggctgcttttatgcaaagagaggtttgagtttatttcattgagagacctgttaagacagatttaacgtgatctacttcctgctgtgtagctttggcggccggaacatagtaacttttttctctcgccacctgatacagtttttcctgagacatttcgcattcgttacgcatctgtttcagacattgttttaactctttgttttctgtctgggaaatcatttccccaaatcttgtaagttctccgtttacgcctgctaaagcgtctgataccatcgttttgtcgtcaaacatgctgatttcctcctataagaatttcattagatcctgtttgtttttcattgctgaattggcagcatcctggaacagtttctttacttccgggtcttttgcttcattggcatactcggtcattttgcagtgggatgtgtcgtaaccgccgataaggtgacgtaaattttgtaagtctaaaactgatatttcggacatttgattctcctcctttatacctattgattctttgttagtatgtcctgttgcggcagtattatacgacgtggatgactttggaattactggaaaattttatgaattgatgaaagagtttctgcatggcagcagatgtacaatacatgcattcgggatgccactgcacgcctaatcggaaagggtgtgtcacggattccactgcttctatcataccgtcggccgtgattccggttatgcgcagatcttcgcctactgttttgatacactgatgatgaaatgtattggtatataaggattccccgcaaatattatatagcaggctattggaagaaagggtgactttatggctgacatctgctcttgactgggacagctgtacatgattgatggaaggagacgggcgcagcgatatatcctggtatatcgtgcctcctgaagcgatattcaagatctgcattccgcggcagactgcaaggagaggaagttttgagtctatgatatgccgcatcaaagacaggtgggacctgtccgtgttcaagtctgtatgtcctctgtctgtgagcagttcttccccgaacaggaagggggtgacatcgtcgcctccgcagaacagaaagccgtcacagatgtctgtataaccggcgtatgtctcttcttgggacgtgcacggcagcaggaccggtgttccgccggatgcctccactgcatggatataagtctgcggcacaaactgccgctcattcataaaaccacaggatacgattccgataatagggttcataagccctccttttcaatgttttgggtgatataaccgggatcattacattttttccccgattggagtatactgatatatagaaacttatattaaaatcttacattagaacgtatgtgaaggagacggtaaatatgaaattgatcgatatgcactgcgacacggtttggaagctgatggacctggggggagaaggcgaccttatgacaggcagctgtgacgttacgataccccggatgcggcaggcaggtacgctggcacaattttttgcctgctttggctatctggatgattttaaagataaaggcggatacgatgcctgctacagacatattctggatatggcagcgtatctgaaggagcagacggagatacataaaaacgacattgcgctggcaaggtccgcagatgatatatgcagaaatgcccggtccgggaagatatccgcggtgctgacggtggaagaggggggagtcctaaacggtgacctggagagactagatgtactgtatgaccagggcgtacggctcatcacgcttatgtggaattatgagaactgcatcgggtatccgaacagccgggatgcgtccgtcatgtggcaggggctgaagccgttcgggatcgaagttgtggaaaaaatgaacgataaaggtatgataattgacgtatcccatgcatccgacggcacgttcagagatgtgatggagtatgcgccgggagcggtcgtggcttctcactctaactgcagggcgctctgcgaccatccgagaaatctgacggatgagatgataaggaggctggcaaatgaaggcggaattgccggtcttaatctgtatggaccgtttctcggtacgcaggatgagtcgcgtctggatgagatgaccgcgcatgtgcttcacatgatagatgtggggggcagcgagttcccggccatcggaacagattttgacggttttgacggaatgaagacgctcgatataccggacgcaggacagatggaactgctttgggaggcgctgaagaaaaaggggctaggagaagaccagctggataagatatggagcggaaatgtgctcagagtctttaagagcctgagagatttacaacagtaaatagtgtgaatatgtatttccagacagcccggttagccgggctgtctttttgcgctgaaaacatcagcggggggagaaatgaagaaaagggatcacaacctttcagcaggacaaaaaggcgccgggcgggtaagtccgccggcgccatgctaatattaagattctttcgcatcaggattttcaccgctgcttttttcttccgcgcagggctccagattctccagcgcatactcgcagcactgaataataagattgttcaatgatatattatttttttgcgcaagctcttccagttttttcagagtctcggcaggtaaacgaaatgtctttgtaatcatttcagatctttttattgaaaacaatataattcctcctgatcatttgccgttacatatagtgtacagattaacgtgcaaataatatacacatcaaaaaatattgcaatatgcaataaaaaataattgcaaataataaagcgcagtgttaagatgatgtagaaagatatttacatatgaaaaaggaggtaagatatggactcaacagcatcattaggatttgcaggaatttttctcataattattggaattgctgcctattttataccgacaattattgcattcaaaaaagaaagagataataaggtgtcaatactggcgttgaacctgctgctgggctggtcgatgatcggctgggtagtatctcttgtctgggcattaaaagaagcgtaggctggactgtgccggacagagataaaaaggaggccaggcagaagccaaagacaggacttgtattgtccggaggcatgctaaagggggcgtatcagatcggagccctgcggaatataagggagagatttgccggactgcctttcagcttcatcagcgctgcttcgataggcgctttgaactcgtatgcgtttctcacggaccggctcgacatggctgagcagttatggcaggaaagcgcggctcatcattcagagttgacgagacttgtgaaaagttcatatattgatgaagtgatcaatgctatatataagcctggcaatttgccgtcagatttctatgtaccgctgtttaattcgggcagacatagtctggaatacgtgcttatgaacggcctggaaagtgaggagatcagactgggcctcaaggccggagtgtcccttcccccctttcagcctggcgtcagactgcggggagagagctattatgacggggctttaatagacaatattccggtcggtcccctcctggagaaggaattagattatattatatgcatctactttgataacagaaattacatatttgaaaacgtggaatttgataaaaaagtaattaagctgaatttttccggcgacagttttataaaatcatcgttttgggcggatacaggagagattcgggagatgatgaacatcggctatgaaaagacggatatgcttctggagaaggtgcttagacggggagtggatgatgtaagttatataattgaaaaaaatatatggcttaataaagcttattccggagagaaaacaagactgagcggggacgttgttgtaaacaggctcaataaagtggcgagaaagtttgtgaaaatgggaacggtacagacaaggagaaaggaatgagtgttaagatgaagaggatactggctgttatattagctgcctgtattgtgctgagcggttgtaaggctgtacagggggaagagaatctgtacgagacaccggaagatactgtgaggcagatcgagtcggcgctgaacgacaaggacgagaaagcattgatcgactgttttgataaaaatgtccagaaggttctttcaggcgggaccaaggtggtaagctccctgctgggagtggacaccgaaggggtatttgagatcgttgccggtctgtatgggatgtcggaaagtgagatacagagcgcagattatgaacttaccgttacggacgttgtgtatgacggggacaaaaactgtgttgtctatgtacatggaaaagctgtcaacagtacaggggaaacggcagaaggagactttgaaatgccattgaaacttcagaaagaacagtggaagataaaggtcactttaaaagaccttggattggaatagttatgagtattataatcattttccttctagtgatttacatgctgccgagtataatcgcgtcctgtaaaaaccatctggaattaaaagcagtattatgcgtaaatgtctttctggggattacaggtataggctggatcacagccctgatctgggccatatctgattcaagggtgcattatttgaaaaagaataaagagaagttggaaacaggtttgatcagtctgcaggaatatgaagaaaacttgaaaaaaatagacaaaaagtaaaacggtaacatttaccggactatttcctgcaaagaaaatgaagccctcttgtactggggatacaagagggctttttcagttatttcttatctgtttcctgcatcttcagcgcacgcactttgagcggaaggccgaacagattaatgaatccttctgcgtcgtggtggtcatacagctcgcctgtcgtaaagcttgctagtgattcgctgtacagggaatatggggaagtcgtgccggctttgataatattacctttgtagagcttgaactttacttctcctgtcacatattcctgtgtgctttcgataaaggcctgcacagcctcgcgcagaggtgtgaaccattttccctcatatacgatctgggacagcttgttgcccatctcttcctttgtctcatatgtagcgcggtctaatacgagctcttcaagctgctggtgcgcctcgtagagaatcgttccgcccggtgtctcgtatacgccgcgggatttcattcctacgactcggttttccacgatatcacagattccgatgccgtgctttccgccaagttcgttcaatttgcggatgatgtcagacactttcatagattcgccgttgatgctctttggaacacctttttcaaatgtcatggtcacatattcgccctcatccggcgctttctccggtgtgacgccgagtacgagcagatgttcatagtttggttcatttgcaggatcttccagttcaagaccttcgtggctgatgtgccataagttgcggtcgcggctgtagctctggcttgcgtcgaacggaaggtcgatgccgtgctgcctgcaatattcgatctcgtcctcgcgggaatccatggtccatacatctgtcatcctccagggcgctatgatcttaatatcaggagcaagtgccttgatgccaagttcaaagcggatctggtcgttgccttttcccgtcgcgccgtggcagatagcggtggctccttcttttcttgcgatttccacaagcttctttgcgatggccggacgcgccatggatgtgccgagcagatatttgttttcgtagacagcatgtgcctgcacgcatggaactacataattatcgcagaaatcgtccacaatatcttcaatatataacttggaagcgccggagagcttcgccctctcctccagaccgtccagctcctcgccctgcccgcagtcaacgcagcagcagatcacctcgtagtcaaaattttcctttaaccaagggatgatggcagtagtgtcaagaccgccggaatacgccaatacaactttttctttcataatatgattcctcctgatatgtattatttgatatgttttatatgctgaaatataagtgatctcgtttgcaatgactactatacaccatattttataattatgcaagaaaaaatggaaataaagttaaaaaatgtataatatacaaatatggtgtataaaaacgtgattatatacacagaatatgaatgaagaataaaaatcatgcttgacaaatgagctgaatcatgtaaaatagttaaaaaataagaaaccataaaatgaattgtgacacaacaaggagcagttattatgaaaagtttgtacacgatggatcacagcgatatcataaataacgtaaactctcctctgctttctgcaggcagtgttgtttttgtgccgtgtattccgtatcccctcggggtattacacgcataaaattcaatactttaagttgcaggaaggatatagttacttgaacccttatttttattcgggctgttttaagacggatatatgcgggaacagaagcgtagcgatatgcttttgttcccgcatatttttttgaaaatagaatggagagttgtgatatggatttcagacaggcattaaaagaaaaaaagaaaattgtgatcaaaataggaacgtcgacgatcacctatccggagactggaaatatcaatctggataaacttgaaaagtttgtgcgcatactgatcaatctgcggaacaaaggcagggaggtcattgtcgtgtcctccggagccgtcggcatcggcaggaatgtactcggatttacaaaaaggccaaaggaaaaggacgtccgtcaggcatgtgctgccgtcggacagggccggctcatgatgatgtacgagaagcttttcgcagaatacagccagctgaccgcccaggtgctgctgacgaaggagtctattacgaatgaagtgtgtgcggcaaatgcacggaacacatttgaccggctggcggctatgaatgtggtgccgatcgtcaacgagaacgacgccatatccgtggatgaagaactgtatggcaactttggcgacaacgacacgatggcggctcatgtggctgcgcttgtcgaggcggatctgctcatactgatgtcggatatagaggggctttatacggatgacccgaaagataatccgtgtgcccggtttgtgcacacggtgggaaagatcgaccgggagctggaggagatggggaagggagcaggaacggccgtcgggaccggaggaatggcgacaaagatcgaggcggcgaagatagccacaggcgccggggcggatatggtgatcgcaagcggagacaacatttatacgatcaatgacattatggcaggaaagaagataggaacgctgtttctgtcctgcggcagcggatacaccggcaagaatgaactggctccggagagagagcagttccgcaggcaggccaagcggatgaagaaagaggcggtgcggaaagatacttcagaaaaaaatacttcagaaaaaaatacttcagaaaaagacaggtcgataaagcaggttgaattgggaggagcatattatgggttacgtgcaggaaattggtagaaaagcaaaagaggcatcaaaaaaggtacagttcttcgggcagtcggagaaaaatgaaggactggaggcagtggcgcgggaactcagacaacagatgggatacctgcttgtggaaaatgataaagatgtgaagaacgcgagagcggccgggatgaaaccggcgctcattgaccgactgctccttacgagccagagaatacaggcgatgtcggaaggactggagcagatagcgatgctggaagatccggtgggccagatggaacgtgtgaagatacgtccgaacggtctccagatcggacagcgcagagtgccgctcggggttgtgggcatcatatatgaatcccgcccgaatgtgacggcggacgcgttcggcctctgctttaaaacgggaaattcggttattctgcggggcggctcagatgcgatccactcaaataaagctattgtcaaggtgataagagacggccttgcaaaggaaaagcttccggcggacgcggttctgctgctggaggatacggaccgggcggcagtcacggagatgatgaggatgaaggaatacatcgacgtgctcataccgcgaggaggagccggacttattgccagtgtggtggaaaacagcacggtgccggtcattgagaccggaacaggaaactgccatatctttgtagatgaatcagcagacctaaaaatggcagtcgacattatcgagaatgcgaagacacagcgccccggcgtctgcaacgcctgcgaatcaattgtcgtgcacagcagcatagccgataaggctgtgccgctgatatatgaaagacttcatcaaaaacaggtggagatacggggagatgagcgagcggtggcgatagaggcgggaattgtgcctgcagatgaagaagactggggaacagaatacctggacgccatcctttcccttaagaccgtcgacacgatagaagaagcgatagagcatatcaatagatacaacacagggcactcagaggccattataacgaaagactatgataatgcgctcaagtttcagaacgaaatagatgcggctgcggtatacgtcaatgcctctacaagatttacggacggacatgaatttggatttggagcagaaatcggaatcagcacccagaaactgcacgccagaggcccgatgggcctcgaggcgctgactacagtaaagtatatcatatccggaaacggacagacccgtccgtagttaaataagaaaaagatggaaaaggacttgaatattatgcacttgtgttgtataattatgcaagtcctttaagtttaaatgcaattggggacggggttttttgaaaaattccccgtcccaaactaaattcaacgtgtccccaactggacattttggattatttggtataatatttacagataccagggtataaaaatacatcggcgcgtctgtgcgccgcggttttgaggaggatacaggatatatgataaaggtaggaattatcggcgccaccgggtacgccggcggggaattggtgagaatcttagcggggcataaggacgcgcagatcgtgtggtatggctcgagaagttacatagacagggagtacgcggatatttatcagaatatgtttcagatcgtggaggacagttgtctcgatgataatatggaggctctggcagagaaagcggatgtgattttcactgccaccccgcaggggttctgtgcttcgatgatcagcggggagctgctcgggaggacgaaagtgatcgacctgagtgcggacttccgcattaaggatgtgccgacgtatgagaaatggtacggcatagagcataagagcccgcagtttatagaggaagcggtatacggcctgtgcgaggtgaaccgggaggcggtgaagagcgccaggcttgtagccaatccgggctgttatccgacctgttcctttttgtccgtctatccgctggcgaaagaaggcatgatagatatgagcacgctgatcatcgatgccaagtccgggacttcaggcgccggccgcggggccaaggtcgacaatctgtactgtgaagtaaatgaaaatataaaggcatacggcgtggccgggcacagacacacgcctgagatagaggaacagttaggccttgccgccaatgagcaggtgctgctgaactttaccccgcaccttgttccgatgaacagagggatcctggtgaccgcatatgcgtctctgaagcaaaatgttacgtatgaggaagtcaaagcagtatatgacaaatattacgacagtgaaaagtttgtccgtgtgcttaagaaggatatatgccctcagacaagatgggtggaaggcagcaattatgtagatgtaaactttaagatcgatgaaaggacagggcgtatcatcatgatgggcgccatggacaatctcgtcaaaggcgccgccggccaggcggtgcagaatatgaatctgatgttcgggcttcccgaggacgagggacttgcacttgtccccctgttcccgtaaggatggaagagaggtaagatatggtcaggataatgacgattgacgattatgacggcgtgtatgccctctggacaaaaatccgcggtttcggcctgcgcagcgtggacgactccagggagggcgtggaacgctttttgaagagaaaccctacgacaagcgtagtggccgtggaggacggcaaagtggtaggaagcatcctgtgcgggcacgacgggcggcgcgggtgtctgtaccacgtctgtgtagatgaagactacaggcgccggggcatcggcagagccatggtaggcatggctatggaggcgctgaagaaagaagagatcagcaaagtatctcttattgccttcactaaaaatgacgttggaaacgcattttggaatacgatcggctggacgagacgtcttgacttgaattattatgattttgtattaaatgaaaaaaatatcacagcatttatcggacagtagtataaaggaggaaaagaacatggatattatcaaaggcggagtcaccgcggcgaaagggtttgaggcggcggcagcggcggcagggatcaagtatacagacagaacagacatggcgctcgtgtacagccaggcgccgtgcgaagcggcggggacattcacacagaatgtcgtaaaggcggccccggtgaaatgggaccagaaggtcgtaaaaagcggcagcaaagtacaggcggtcatcgtcaattccggtatcgccaacgcctgcaccggcgcagaaggatacggctactgcgaggacacggcggcggcagcggcagaggccctcgggatatccggcgacggcgtagtgatcggctccaccggagtgatcgggaagcagatccccattgagaaactgacggcaggtatcaaagtgctggcggaaaagaaaaatgacagtctggaaaacggtacccaggcggccagagcgatcatgacgacagacacatttgaaaaagaactggccgttacgctcaaggtgggaggaaagacggtaactatcggcggaatggcaaaaggttccggcatgatccacccgaacatgtgcacgatgctggcgttcatcacgacagacgcggacattacaaaggaagcgcttcagaaagcactgagcggggatgtagatgatacatacaatatgatatccgtagacggggatacgtcgaccaatgacacggtactgctgctggcaaacggactggcgggcaatccgcagatccggtacggaagcgaagactataaagcctttgccggggcgctccatgtggtcaacgaatatctggccaaaaaaatagccggcgacggggaaggggccaccgcactttttgaagtaaaggcggtcggctgcgagagcacagaacaggcccggttactggcgaaatccatcgtatgttccaatcttacgaagacggccatcgcaggacatgatgccaactggggcaggatcttatgtgccatgggatactccggcgcgcagtttgacccggaaaaggtagatttattctttgagagcagagcaggaaagatacagatcatagaaaatggaaccgcagtagattacagcgaggcagaggcgacaaagatactctccgaaccggaggtgacggccaccgcagacgtgaagcttggcagcagcagcgccaccgcgtggggatgcgacctgacacacggctacatagagatcaacgccgactacagaagctgacaaagtaaaaggagctagggaatatgaacaaaggtatgcagaaatatctggataaagcggaagtcctcatcgaagcacttccttatatccagaggtttaaccgtaagatcatcgtcgtaaaatacggcggcagcgccatggtggatgaggacctgaaagaacaggtcatcaaagatgtgaccctgcttaagctcgtcggcttcaagccgatcattgtccacggcgggggcaaggagatcagcaggtgggtcggcaaggtcggcatggaaccggagttcgtgaacggcctgcgggtgacggacgaggcgacgatggagctggccgagatggtgctcggcaaggtgaataagagccttgtgcagcttgtagaaagccttggcgtccgtgcgatcggcatcagcggtaaagacggcggtcttctcacagtagacaagaagctcgctgacggagaagatatcggatttgtgggagagatcaaaaaagtaaatgcggatattctgtacgatctgctggagaaggatttcctcccgatcatatgcccggttgggctggacgacagttttaatacatacaatatcaatgccgatgatgcggcctgcgccatcgcaagagccatgcgggcagaaaaactggcgtttcttacagatatcgaaggcgtgtataaagatccccatgacccggggacacttatctcagaactgaaagtgtcagaggcgcgcaatttgatgaatgaaggatatatcggaggcggcatgctcccgaagcttcacaactgcatcgatgccatagagcacggggtatcgagggtccatatcctggacggaaggatcccgcactgccttcttctggaaatattcacgaacagaggaattggaacagccatattaaatgacagcgaagaacgctatttctacggagaataagaattatgaaaaatcagtatatagcagatacggatacaaatctcgttcatacatacaaccgttttccggttgtgctggaaagaggagagggcgtgtatctatacgacgaaaaagggaagaaataccttgattttgccgcaggtatcgcggtctcttccctcgggtacggcaacagagagttcaacgatgctctgaaagaacagatagacagcctgatccactcgtcaaacctgtattacaatacaacgtgcggaaaagcagccaaagcgcttgggcgcatcacggaaatggaccgggtgttctttgcgaacagcgggacggaggcgatcgaaggagcgcttaaggcagcgagaaaatatgcttataaaaagcagaccggccgctgtgagtttatagccatgaaagattccttccacggcagaagcatgggagcgctttccgtcacagaacacgaggcgtaccgtgcgccgtttgaaccgcttattccgggcgtggcctttgcagagttcaacaacctggaaagcgtcagggcacttgtgacagacaagacgtgtgcagtcattctggagcctctccagggggagggcggaataaacagagccgatgaagcgttcatgcagggtatccgcaagctctgtgatgaggaggggatcctcatgatctgcgatgagatccagtgcggtatgggccgtaccggaacgatgtttgcatggcagggctacggcacaaagccggatatcatcgcgatggcgaaagccatcggaggcggggtgccggtcggagcgttcgccatgacagaggaagtcgcccgttattcccttgagcccggagaccacggaacgacatacggaggcaacccgcttgtgtgcgccgcggtggcaaagacggtagagatctttgagagagaaaaactgacagaacatgtgaaagagatggggcgctacctgaccgcacaactggaagcgcttaaagagacgtgcgatatgatattggaagtgaaaggaacagggctgattcagggtatccggcttaagaagccggtcggagagactgtgcaggccgccatcaaagaagggcttcttgtcatcagcgcgagaagcgatgtcatccgtctcgtgccgccgcttgtcatcgagaaagaacatatcgatgaaatgatcgaaaaactgaagaaggtgttataacataattaaccagtcattggatatactataggtaaaacataggaggtatatctgatgattggttttttcatagctctgctgtccggagcgttaatgagcgtgcagggagtgtttaatacacaggtgacgaagacgaccggaatgtgggtgagcaacggctgggtacagctgagtgcctttgccctctgccttgtggcatggcttatcgcaggcagggacaatgttatgacacttgcgaaggtagaaccgaaatacgtactgctcggaggcgtcataggcgccgggatcacatggacggtgatcaagagcatggagcagctggggccggcaaaagcggcgctgctcattgtcatctcccagcttatcattgcgtatgtgatagaattgttcggcctgttcggagtcgataaacagccattggagtggcgccgtgtgatcggtatggcgatcgcgctgattggagttgcaatttttcaatggaaatagtacaataaatctatctggcataagaggggtatttacagtttcgacagctgtaaaggaggaattttatgcttgacagatcaagggaaatcggttgtttgatgtgtatgctttttgtactcgccctgtcgggatgccgcggggaggaggcggaagaagtgagggaacttgacaacgcgcagtctgcggcagaagagcacggagaaagcgcggaggaagagacactggaaacagaaggaaaagatacggaaggatccggccgtcagcaggagatgtatatccatgtctgcggccaggttcatcaacccggtgtctaccggctgcctgcggacagccgcgtgtttgaagccgtggaggccgccggcggcatgaaggaagaggcggacagcgcttaccttaaccaggcagagatcctgtcggacgggcagcagctgtacatacctgccctgggagaggacatcagccgggcagaaacagccggggtacatcctgacgaaaaggatgacggaaaaataaatatcaatactgctgcgaaagaagaactcatgactttaaatggcataggggaagccagagcggacagtattataaaataccgtgaagaacatggaggtttccgatccatagaagaactgaaagaagtggaagggatcaaagatgggatctttaataaagttaaggatcaggttaaggtttagcgaatttaataagggagagaagtatgagtaagagagtattggtcgtagatgacgaaaaactgattgtgaaaggtatccggttcagcctggagcaggacggcatggatgtggactgtgcgtatgacggtgaagaggcgctgaagctttccagggagaatgcctatgatatgatcctgctggacgtaatgttgccgaaatatgacggattccaggtgtgccagcagatacgggaattttccgacgttccggtcgtcatgctgaccgccaagggagatgacatggataagattctagggcttgaatacggggcggatgattatatcacaaagccgtttaacattctggaggtgaaggcgcgcatcaaagcgatcatgcgccgcacgagcaagcgggacagcaagacggtaaatgataaagttatcataaagagagagatgaagatcgactgcgagagccgcagagtatttatcgaggagaaagagatcaatcttacggccaaggaatttgaccttcttgagcttctggcgatgaatcccaacaaggtgtacagcagggaaaatcttctgaacattgtctggggatatgagtatcccggagacgccaggacggtagatgtacatataaggcggctgcgggagaagatcgagaagaaccccagcgatccgaaatacgtgtacacaaagtggggagttggttattatttcaggggttagaaagtatttcaaaaaaaatatattcaagagtctccgctttcggatcatcctcctgctgctggcggcaggaatcatcccatgcctgatcatgaaagcggtgatcctcaacagttatgagaagcgcgcggtagaggtacggaccgcggatatacagaatcaatgtacaattctatgtaaccagttaagcggcatagactacttaaacggtattacatctgaggtcatcaggacagaactgacacagctgaccaacatctacaacgggcgggtgatggtcattgacagtgactatgagatagaagaagacacttacaatctcgataaagggaaaacgatcatttcagaagatgtcatcaaatgtttccagggaaagagtacaagccattacgatgcaaaaaacagatatatagaagtgactgcgccgatcacagaggcagaatcggacgcggtcaaaggtgtcatgctcgtgagcgtatctacagattccatcgcagacagcatggcggtcctggaagggaatgcaaatgtggtggcgatcattattatcgtgacgatgacggtgctggcattttttgcaggcgtcgtgatggtgaagccgttcaagcggatcacagattctatcggcgctgtgacggaaggctatgatgacaattatctgcatgagaacgcgtatacggagaccgtgctcctgtcagaagcatttaataaaatgcttggaaggatgaaagttttagatgactcaagacaggaatttgtttctaatgtatcacatgagttgaaaacgccgctgacatcaatgaaagtgctcgcggattctcttctgagccaggaggaagtcccggtcgagctgtaccaggaatttatgggtgatctgtccgaggagatagagagagaaaataagatcatcaatgatcttctgtcgctcgtaaagatggacaagactgccacgacgctgaatatcaagtcggaaaatatcaatgaactggtggaaaagatactgaaacggctccgcccgatcgcggcaaaccgcaatgttgaagtcgtatatgagagcttcaggccggtcagcgcggaagtggacgagatgaaactgtcgctggcactgtcaaatctcgttgagaatgcggtcaaatataaccatgacggcggatgggtccacgtatcgctcaatgcggaccacaagtatttttatgtggaagtggcggactccggaattggaataccggaagatgcggtggaacatatatttgaacggttttaccgagtggataaatctcattccagggagatcggcggtacagggctcggcctgtccattgcgaggaatgccatcgtcatgcacagaggcgcggtcaaggtgtacagccaggaaggggaaggcactacatttacgatcaggatcccgctgacatatgtgtcatgacagaaaggaggaccagatgaagaagaaatatgtgagatgcctctgcatcctgtccacagctatccttctgtccggctgccaaagaggcggaaagccagggacaacgggtacatgcatgtattatgtaaacgccgaagggacgggacttggcaaagaggcatacgatataaaaggagacagcgcagaagaagagatcaaatccgtgcttaaggatatgtacaaagaaccggaggatgacgattaccggagcgcctttccgggagaaattaaagtggacgactggaaactggagaaagggagactgaacctctactttaacgagagttacaaggacatggacgccgcgtcggaaatactgctgcgggctgcagtcgttcagacgcttgtgcagatcgcgggagtcgattatgtgaatttttacgcaggcggcgaaccgctcacagacaatgagggagatgagatcggctatatgcatgcggaagattttgtgcagaataccggttccagtcttcactcgtaccagctggccaatcttcatctgtactatatcaataaaaaggggggcaggcttggcgaggaagaagtcagtgtccgctataacagtaatatgtccatcgaaaaacttgtcgtcgaacagatcataaaaggcccttccatgcaggaacaccagccgtcggtaccgcccgagacgaagctcctaggcatatcggtcaaagacggtatctgctacgtcaattttgacgatggctttatgaacgccgtgtatggagtcagtcctgaacttacggtctattccctcgtaaactctattgtggaagcgggcgatgcaaacgaagtacagatatcagtgaacggcgagactgatgtaaaatatcagggagtcatagacctgagcaaaccgctctccagaaatctcgaattggaggaaggtggagcaaaataggtaagaacagaatattatgcagcgtatgtcttttgttttccgttgtcctcaccgcggctgtctgcctgggcggggaccggtttgtgaaagaacggaagataacgccgcttatgcgggaagccaggtccggtgattcactgagcatcaccggacaggtgtacgcgatagaggaaaaatctgaatatcaaatcttatatctgaaaaataatacagtcaagttccaaaggcagatgctggaggagtcaaaattcatcgtttatgatacatccaaacaaaaagtcaaagcaggaaacaaggcagcggcagagggaaaagtcaagttctttgaggagccgcgcaatccggggaatttcaacgaaaaacaatattatgaaaagcaggggatccacgcctgtatgtggaccgatagtataaaagtcaccgacagccgcgtctggaaagtgagagacggccttttttcattccggcggaaatggaagacggtcttatatgagtttatgggagaaaagcaaggcgcgctgctctccggcattatgctcggggacaagtctgatatcgacccggaggtaaaaaaactgtaccagatcaacggcatcggccatatcctcgccatatccggcctgcatcttaccttcataggattcggcctgtaccgcgccgtccggcgtctgagcggctcctgcaccgcgggtggcgtatgcggcgtcttatttctcgcagtctacatacttatgacaggcgtttcggtctctgcggtgcgcgcggcggtcatgttcctgtttcgggccggcgccgagatggcaggccggcattatgatgcccccacggctctttctgccgccgcggtcactgtgctcgtctggcggccccttcatctgtatgacggcggattctggctctccttcggggcggtctttggcgcggcggtcatactgcccctgtttaaaaagctgccggtacaggggctgtgggcaagcgtcagtatacaaatatccgtcttcccggtccttctctattatttctatgaatttccgctttacagcctctttctgaacctgctcgttgtcccgctcatgtcggtgctgcttttcctggggctggcaggcagcgccgccggacttatcgcagaactaccgggagaagcagtctttaccgtgtgcaggatgatacttaagctttacgaatggatctgccgaacggcagctgcgtttccggcggccaggatcattacaggaaagccgccttttgccggcgtcgtctgctattacattctgctggcttttgtactccttatgtggagccgccggggacagagacaaaacggtgtgaaaagagaaaaatatatagcaaagtatataataatatccgggatcacatgggttctggcgcttttgattctgctgcttccgacaaaaatcggaagaggcggcatgcttgagatcacgatgcttgatgtggggcagggggacgggatctacatgaaaagtccgtcgggcacgacgtacttttttgacgggggaagcagtgacgtgcggcaggcgggaaagtaccgtatagaatcttttcttgcgtataaagggaccggggcacttgactatgtctttatctcccacggtgacagcgaccatatgaacgggatacgtgagatgatagagaggggcccgcttggcatctctgtcagacatcttgtgctgccgcggaaagaagtgtgggatgacagccttgccagtctggccaggcttgccggggaaaaggggatagaggtgctcatcatgaagccgggacagagcatccgggacggccggctgtcgcttctctgtatgcatcctggcagcaggtacggtaatgagccgggcaatgcagcctccatgtgtatatgggccagatacgcaggctttgacatgttgtttaccggcgatgtggaaggggcgggggaggcagaacttatcggctttctcagagagacaaaggcagagcgggaaaaagaggggttcgacggcgttctcgaaattctgaaagtggcgcatcacggctctaagaattccacgacagaggaattcctgacggagacagatccggtatatggcttcatctctgcggggagaaataaccggtatggacatccccacgaagagacggtggagagacttaaggagcgcgggtgccggcttttctgtacccagacggacggcgccgtcactgtcagaacagacggcgttcagatgtatctttccgtgtttgtttcaagcgcggataaataaggaaacggttgaattaaaatctaaaattaagtatactgagatacaggataaaaatatagaagtgaggtaatgatcatgacgtatgaggaagtattggcaaatgccagaacatgtatgggagaacactgtaaagcctgtccggtatgtaacggaaaagcatgcacaaataaagtgccgggaccaggggcaaaaggaagcggaacagtggcggtacgcaactatgagaaatggcaggaactttgcgtgaacatggacacgatctgcgaaaacagaccggtggatatgacctttgaggtatttggaaagacgttcaagtatccggtatttgcagcgccgataggcgccatgaagcttcactacggcgataagtatgatgatctggaatacaacgatatcctcgtatctgcctgcgcggacgccgggatcgcagcgttcacaggcgacggcacaaatccggatgtcatgaaagcggcagcgaaagccataggccggaaggaaggacggggaataccgacgataaaaccgtgggatattaatacattgaaagaaaaatttgcgctcgtcaaggaggcaggcccgtttgcggccgccatggatatcgatgcggccggactgccgtttcttaagaatctgacccctccggcggggagcaaaactgtggaagaattaaaagagatcgtggcggaggcgggcgtgccgttcgtcataaagggagtgatgaccgtcaaaggcgctctgaaggcaaaggaggccggggcagccgccattgtagtctccaaccacgggggccgcgtgctcgaccagtgtccggcaacggcggaggtgctggaagagatcgcggaggcggccggaagcgatatgaaggtattcgtggacggcgggatccgttccggtgtagacatattcaaagcgcttgcgctcggggcagacgcggtgctcatcggaaggccgtacgtgaccgctgtgtatggcggcggggctgaaggagttgccgcatatacgtccaggcttgcggcggagctctccgacacgatggctatgtgcggcgctcacagtctggatgagataacaagggatatggtgcgttaatttattatgaagagtttgaatgaggatatcaggacaggacaatttaagcaggtctatctgctgtacggggaagaggcttacctgaaaaagcagtataaagataagctgacccgcgccatgcttcctgatggggatacggtgaattacgcctattatgaaggaaagggcatccacatcaccgagctcatcgatctggctgagacgatgcccttttttgccgagcgccgtcttattgtcgtggagaattcagggttcttcaagaacgcggcgccggaactggcggattacatcagatccatgcccggcacggcgtgctttctctttgtggagtctgagacagacaagcgggggaagatgtttaaagccgtaaaagacaaaggacgcgttgttgagatggggcgccaggatgagaagaccctcatcatgtgggtcggcggcaatgtaaagagagaaggaaagcagatcaaggaatctaccgtacgttatctcatatcaaagaccggcacagatatggagaatctggacagagaacttgagaagctgttctgttatgccatagacagaagtgagatcactcctgcggatatcgatgccgtatgtacgacgcagatcacaaataaaatatttgacatgatcgaggccgtggcggcaaagcagcagaaaaaggcgctggattattattatgacctgctggctttgaaggagcccccgatgcggatcctatacctgctgtccagacagttcaaacttctgtatgaggtaaaggatctcctcgggagaggatttgacaaggcccagatcgccaaaacagcgggacttcatccgtttgtggcaggcaaatatataagccagtgcaggacatttgcggttcatgagttaaagcgcatcatggaagatgccgcggatacggaagagctggtgaaaacagggcgtttaaacgatgtgatgagcgtggaacttttcattgtaaagtacagtgccgcgtgatatactaccctcagttggcgaagcgcaggctttgccggcctgtgttttgtgcacggacatgaaagaaatatagcggaaggaacgatataagtggcagaagtagaacagagtaaaattcgtaatttttgtatcatagcacatatagaccatggcaaatcaacgctggcagaccgtatcatagaaaagacagggatgctgacgagcagagagatgcagtctcaggtgctggacaatatggaactggagcgggagcgcggcatcacgatcaaggcgcaggcggtgcgtatcgtgtatcaggcagatgacggggaggagtatatctttaacctgatcgatacccccggacatgtggactttaattatgaagtgtccagaagcctggcggcctgtgacggcgcgatcttagtcgtggacgccgcacagggggtggaggcacagacgctggccaacgtctatctggcgctggaccacgatctggacgtgatgccggtgatcaacaaggtggatctgccgagcgcggatccggacagagtcatagaggagatagaggatgtcatcggcattgaggcggaagacgcacctcagatatcggccaagacaggattcaatgtggagaaagtattggagcagatcgtggagaagatccccgcgccgggcggagatccgaaggccccccttcaggcgcttatcttcgattccgtgtatgattcctacaaaggagttattgttttctgccgtatcaaagaaggtacggtcagaaaagggacgaagatcaagatgatggccaccggggcgtcggccgaggtggttgagatagggtacttcggggcaggccagttcattccgtgtgaagaactgagcgcgggcatggtcggctatattaccgcaagccttaaaaatgtgaaagatacccgcgtcggagacacgatcacggatgcagaacatccgtgcagcgagccccttccgggatataagaaagtcaatcctatggtgtactgcggcatgtatccggcggacggagcaaaatacccggacctcagagacgcgcttgagaagcttcagctcaacgatgcctctctgcagtttgaaccggagacttcgatcgctcttggattcggtttccgttgtggattcctcgggctgcttcacctggagatcatacaggagaggctggagcgggaatataatctggacctggtgacgacggctcccggagttatatataaagtgtataagacaaacggagacatgataccgctcaccaatccgtccaacctgccggatccctccgagatcgaatatatggaggagccggtcgtgaaggcggagatcatggtgacatccgaatttatcggcgccattatggatctgtgccaggagcgccgcggtgtgtatgacgggatggaatatatcgaggagacgagagcggtgctccgctatcatctgccgctgaatgagataatctatgacttttttgacgcgctgaagtccaggtcgagaggctacgcttcctttgactatgagatggcaggttatgagcgctcagatcttgtgaaactggacatactgatcaacaaggaagaggtggacgccctgtcctttatcgtgcatgcggagaccgcgtatgagcggggccgcagaatgtgtgagaaactcaaggaagagataccaagacagctctttgagatcccgatccaggcagccgtcggaagcaagatcatagcaagagaaactgtaaaagccatgcgaaaggacgtgctcgccaagtgttacggcggcgacatcagccgtaagcgcaagcttcttgagaaacagaaggaaggaaagaagcggatgcgtcaggtgggcaatgttgagataccgcagaaggcatttatgagcgtactgaaattggatgataaatagatgagaccattagaattatatattcatataccattttgtatcaaaaaatgcagatattgtgattttcaatccgctccttccacgaaggaggagcggcaggaatatgtgacaggcctttgccggaagatccgttcctacggagagctggcagaggcttatcatgttgtgactgtctttatcggtggagggaccccctctgtgctggagggggctcagatactcgatattatggacgcggtcagaggcacgttcccgatagacgcaggcgccgagataacgatggaggccaatcccgggacagtcacaaaagaaaagtttaagacgctccggcatgccgggatcaaccggctcagcatcggtctgcagtcgacggataacagtgagctgaaaatgctcgggaggatccatacgtatgaggattttcttcaaacatttgatgcggcaagagagacaggctttgacaatatcaatgtggatctgatgtctgcgatcccgtttcagagcgtggacagctgggatacgacattgatcaggacggccgggcttggaccggagcatatatccgcctacagtctcatcattgaggaaggtactccgttcttcgagcggtacggcaatggaaaacgggccggggaactgccgtcggaggaggaagagcgtctcatgtatatgcacacgcgcgatattctttcagaatatgggtatcacagatatgagatatccaattatgccaggccgggatatgaatgcaggcataatctcggatattggaacagggcagagtacctcgggatcggaaccggagcggcatctctcatgcaggagtaccgttttacagaaggggaagagccggtcaagttgtcggtacaggaacagatggaagaatttatgttcctcggtcttagaaagacagaaggaatatcgaagaaggcatttcagaagtgctttggcagggcggtcgagagtgtgtacggaaaagtgataatagagatgtgcaggaaagggctgttggaaatggagggcgacgcggtccggctcacagagaagggaacagatgtgagtaattatgtgatgagtgcattccttctcgataaggaagcgtgactacagcttcagtataataccggccgcggcgcctgcggcgatccatatgacaggatggagctttgcgagcttccggatctgaaggaggccgaatactgccgcacagatgaaaaggctcagataatctatccgtatctgcccgccgctgacggagaaaagagcgatcttaagcagttcccacacggcgtaagcgatcagggcggccacagtaggccggattccgtagaagacagccttcaccgtcggattctcgctgaagttttccaggaatctggcgatgatgacgatgatgatgagcgccggcgccacgagggaaagtgtcgccacaagagcgccggggatcccggctgcgttgtagcctgcgtaggtggccatattaatgcccaccggaccaggcgtactttcgcttatggcaaccatatttgccagttcgcttgcagagaaccagtcgtatctggacgtcagatccatgaggaacggcagggtggccatgcctcccccgatggagaacagtccgatcttaaagaattcataagccagtgtgatatagatcatgacagttttctcccctctgcctttttggcgatgacgcctgcggcggcggcaaggacgatgacagcggcggtcgggaccggggtaaagcaggcgagaagaaatgcggcggcaaagagcgccacaccaagcttatctacaattccttttctcgccatcgtcacgactgtgttcaccataagcgcgcagacgacgatacggattcccgcaagtgcatgtacgacggcgggaagatgtataaaattctggagaatggacgcaatgaggcagataatgataatggatggcgagatgacgccgagcgtggcgcagacgcctcctgtgaaccctgcctggcggtaaccgacgtaagtggcggtattcacagcgatgacaccgggagtgcactgcccgatggcgtacatatccagcacctcttcctcggtacaccatttccgctgttctaccacctcccgtttcagcatgggcagcatcgcaagcccgccgccgaacgtaagcccgccgatccggaagaaacttgcatacagttccaacagtttctttaaagacactttttttgatctcatagaaggttctccataataaacgcgtatatctgcggattctttttcgtccagttattggatatcgtcacagcctcagactccgtcggtacggtgagggtcaggtcaatgagcggggcgccctgctcgaatacctggcagcggaccgagtattccatattagaattctgataatagtctgatttgacggcaacttcattttttaactcatactgtttttcctttaagaaggagtcaatgtcctgctgtatggcgggggagatatcatttttaaagtagcggatcgtctcgtcaccttctgccgtgaggtgatagaaggtcctgctgtgggttgactcctccctgacaaagccggaggcgatcagctccgatatcgcctgctggagtttgaagtatgtcgtgtagccttcatccagcacgaattccgatatctgggaattggtaagaggaaagtctacttttttcagcatgtatagaatgatcagtttgtatagtgtaaatggttcagccatcgtcataactcctttccctgccagatgtcatgctttttcagatatgactgcatctggtttaatacaagtctcttattgccgctccacttcggcgctatgagcagctgtttcgggccgtcgccggtgagcctgtggagaacgatatccgggcttatactgccgatacatctgccgagcagataaaaatactcttccatggacgggatccagaacggaagtgtctcataatatgcggccagagcagtacctctaaggacgtgaagcagttgaagcttcagcccctggataccggcgccgttcagataatgaagtgtttccagcatcatggacagatcttcccccggaagggcaagtatcgtgtggacgatcacatcgataccggcatcctgcagcatggcggccgcctgttcaaagaccgggagagaatatccgcgtccgataaaagcggcggtctcttcgtggatagtctgcagccctaactccacccacaccggttttatccgccggatatcctcaagcatggatatgacatctttatcaagacagtcaggtcttgtggcaatggaaatgatgcggacatccgggtgccgggcggcctcggtaaagatacgcctgagataagggagcggcgcataggtgttcgtatatgcctggaaatatgcgatataagaactgccggcatattttccggcagtccgcaatttcccgcactcgatctgctccgtgacggtcagttttctgtccgaggcaaagtctccggaaccgccttcgctgcagaagatacagccgcgggtgccgagcgtcccatcccggttcggacacgtcatacccccatccagggcgatcttgtataatttttctccgtacgtcttcttcagaaaaaagtcaagagagtgatatctcttttcgccccagtacacagccatcgcatcgccgccttttcatgaatatttttacttaattaatatatcattgatatcttcggttgacaaggcttaccagcccccgcggataaggttttgaaaaaaagtctttctattttctggaagatggtgtataatatgtccaataaatattaattatttcaggctggtcgtttcagaccatgactcccacagtgaatatcaaagatttaataacggaaaggaaagtcgattatgatgaaagcaaagtatgaatccctgccgcttgcaacgttaaaggacctggcaaaggcgagaggattaaaaggaatctcaacgatgaagaaagcagagctgatcgaacttatgctggaagaagatgagaaggaaaaaaaggcagagcgggaaaatgtcaaggagatgtctgccaacacaggtgacaaggaagtgcatgatattgacaagctggacagtggggttacggcccgcggcatcctggaagtgcttccggacggatacggttttataagaagcgataattacctgccgggagataatgatgtatacgtatccccgtcacagattcggaagtttaacctgaagacaggagatattctggaaggaaacacacgcatcaagacgcagcaggaaaaattcagcgccctgctctatctgagcagaatcaacggaatggagccgatgcgcgcgctgcgccggagcaattttgaagatatgacgcctattttcccggacgagaggcttcgtctggaatgcggcaagacaagcaccgccatgaggatcgtcgatctgctctcgccgatcggcaaaggacagagggggatgatcgtgtcgccgccgaaggcaggaaagacgaccctgcttaagcaggtggcgctgtctgtgaggcagaataatcctgagatacatctgctcatacttctcattgacgagcgtcctgaggaagtgacagatataaaagaggcaattgaaggggaaaatgtggaagtcatctattctacatttgacgagcttccggaccatcacaagcgtgtgtcggagatggtgatcgaacgggccaagcgtcttgtggagcacaaaaaggatgtcatgatacttctggacagtatcacaaggctggcgcgtgcatataacctgacagtgccgccgtcaggaagaactctttccggcggtcttgaccctgcggcgctgcacatgccgaagcgtttctttggagcggcaagaaacatgcgtgaaggcggcagccttacgatccttgcgactgctcttgtggacacgggaagcaagatggacgatgtcgtgtatgaagaatttaaaggaacaggcaatatggaactcgttctggacagaaaactgtccgagcgcagagtgttcccggccattgacattccaaagtccggcacgagaagagaagacctgctgctttccggggaagagcaggaagcggtagattctatgagacgcgcgctgaacggcatgcgggcggaagaggctgtagacaatattctgaatatgttcacgagaacaaagagtaataatgaacttattcaaatggtaaaaaagacaaaaataatatagacaagagtgttgttttgtgatacaataacaaagctgtttagaaattgaacattatcagacgcgcgatgcgcgtgagtaaaataaagaagaggtgaaaatcatgaaagaaggaatccatccaacatatcatcaggcaactgtaacctgtaactgcggcaacacattcgtgacaggctcaacaaatgaagaaatccacgtggagatctgttccaaatgccatccgttctacacaggacagcagaaagctgcacaggcccgtggccgtgttgacaagtttaacaaaaaatacggaatggacaaatagtcatacaagtagcgggttgaggttgtttaatctcaaccctttctgtatataggcatcgaaaggggaatatatgaagtcatctaatatcggaggacaggccgttctggaaggcatcatgatgaagaacaaggatgattacgctgttgcggtcagaaagccggacggagagatcatcgtggagaaggatacgtacagcagtatcgtgaagtggaaagctttgacgcgcataccgtttgtccgcgggatatttaatttcatagactccatggtactcggaatcaagacgttgacctattcggcggggttctttgaagaggaggaagaggaaaaggagctgacagaggcagaagcggcaaaaaaggaaaagcaggataaatggcttatgggagggaccgtggctgtctcggttgtgatcgcggtggccgttttcatggtgctgccttattttctgtccggccttctgaagccgctcgttccgtcctatcatgtcagaacggtcatagaaggattcgtccgtatcggcatcttcatcgcatatgtacttctcatctcaagaatggaggacatccagcggacatttatgtatcacggggcggaacataagtgcatcaactgtatcgaacacggactccctctgaatgtggacaatgtcagaaagagttccaggcagcacaagagatgcggaacgagctttctcttctttgtgctggcggtcagcatcatactgctgctcgttatccaggtggaatctcccctgatgcgtgtcgtcataagaatagccctcattccggtcatagccggcatctcctacgagatattaaagctggcggggagcagtgagaatccggtggtcaactttctgagcagaccggggctggcaatacagaagctgacgacaaaagagccggacgacagtatgatagaggtggcgatacaggccgtagaggcagtgtttgactggagagcatatgaagcagagaatttccaacctacagaagatctataaggaaggcacgcgccttctcgccggtgcgggtattgaggaggcaggcatagatgcgtggtatctgctggagtacgtcaccggaatcacaagggcggcatattacgcgcacccggagacagaactggacgcagacaaggaggacgcctactttgcgcatattggacgcagagcgcgaagagagccgctccagcacattaccggggagcaggaattcatgggatattcgttccgggtgagcggacatgtgctcataccgaggcaggatacggagattctcgtggaagaggcgctcaaggtacttgcgccgggcatgcgcatcctggacatgtgcaccggttccggatgcgtcctcatcagcattctgaaagccggccgggaacggctgcgcatggagcggctggaagggacgggaagcgatatatcgccggaggcagtggcggtggcacaatacaatgcagcgcgcctgcttgggcgcacagagccgggaaggggtaataacggctgttgtgcccggttctgtacgggtgatctgtttgagaaggctgaagaaagatatgatcttatcgtgtcaaatcccccttatatacggacggaggagatccggaagcttcagcgggaagtgcgcctgcatgacccgtatatcgcgctggacgggaagaaggacggtctgtatttttacaggaggatcacagcggaaagcgccgcctatatcgcagagggcggatatctgatgtttgagatcggacacgaccaggcagaggatgtgtgcacgctgcttgagcagtccggatacgcggacgtctttgtgaaaaaggacctggcaggtcttgaccgtgtcgcaggcggcaggtacaatagaaaatgcacacagtgacagtggtgtattgaaaatcgaggaggaagaattatgtttgacaaattagaggatctgctcattcgttatgaagaactcatgagcgagctgcaggagcctgatgtggtgaataaccaggaacggttccgcaggcttatgaaagaacagaatgaccttgccccgattgtggaagcatataaagaatataaagcctgcaggcaggcgatcgaagacagtctgctcatgctggaggaagaatccgatgaggagatgagagaacttgcaaaggatgagctgaacgaatccaaggcaagggtggaggaactggagcatgagctcaagatccttctgctcccgaaggacccgaatgatgacaagaatgtaatggtggagatcagggccggcgccggcggcgatgaggctgctttgttcgcggccgagatctaccgcatgtacgtacactatgcggagggccggaggtggaagacagagatcatctccatcagtgaaaacgggatcggaggcttcaaggaagtggtgttcatgatcaccggacagggagcgtattcaagactcaaatacgaaagcggcgtccaccgcgtacagcgtgtgccggagacggagagcggcggacgcatccatacttctacagtcacggtggcgatcatgcccgaggcggaggaagtggatgttgtcatcgacgagaaggatatccgtatcgacgtgatgcgtgcttccgggaacggaggacagtgcgtcaatacaacagactctgcagtacggctcacacattatcctacggggatcgtcatctacagccagacagagaagtcacagcttcagaataaggaaaaggcattccgcctgctgcgttccaagctgtatgatctggagatggaaaagaaacaggcgtcggaggcagaggcgagaagaagccagatcggtacaggcgaccgttccgagaagatacgtacttacaatttcccccagggacgtgtcacagaccacaggatcaaactgacgctgcacaaactggactctgtgctgaacggagatctggatgaagtgatcgacagcctgatcgccgcggaccaggcggcgaagctgagcaaccttcaggacgaatagaaaaagatgaaagagaaattaaaaaaattaattgcctattataaaccatataagctgctgttctacagtgatttgttttttgccgttctcggggccggagtcacgctcgtgataccgctgatcgtgagatatatcaccaatcaggtcgtatattatgagccgccggaggcgagacaggcaatcatcatgctgggagcggtcatgattgcacttgtactcctggagttcgggtgcaattattatattgcgtacttcggacatatgatgggagccaggatggaagcagatatgagaagcgacatattcgggcattaccagaagcttacctttgctttttacgacaatcagaaggtcggacatctcctgtccagaatcacgagtgatctgtttgatatcagcgagctgctgcatcacggaccggaggatgtactgatctccgtcattaaaattgccggctcttttcttatactcgtgaatgtgaatgccaggctgaccgcggctgcattcgcgtttattccggttatgtttctgttcgccgtatattacaacaagaagatgaaacaggcattttcgagaaaccgggcgaagatcgcagatatcaacagccagatcgaggacagcctggcaggaatccgggtcgtcaaatcttttgggaacgaaaaagaagagatgaaaaaattcgatcggggcaataataactttgtagaagcaaaaaagacgagctaccggtacatgggcatgtataattccgggctgaacgccctgaccacgcttgtgaccgtgggagtgctcgtcgcagggggaagttatctgacgaccggcactgtcggcgtatctgatctgatcacgtttcttctgtacatcaacaactttacggagccggtaaagaagctggtcaattccgcggagcagtttcagaacggctatacgggatttgagcgctttctcgagatactgtccatagcgccggacattgcggacaaagaggatgccgtgcacgtggagaaattaaagggtgagatcatcttccgggatgtctcgttccactatgaggacaatgctgaaaaggtgctcagtcacatagatcttaaggcggacgccggcgattacatagcgcttgtcgggccgtcaggggccgggaagacgacgctctgcagccttatcccgaggttctatgacgtcacgtcgggagagattctcgtggacgggacggatatcagggatctccgtctgaatgatctgaggaacaatatcgggatcgtacagcaggacgtatatctctttgccgggacgatcatggataatatccgttacggaaagccggaggccgcggatgaggaagtggtgcgggcggctaagaatgccaatgcccatgaatttatcatgagttttccgcaaggatatgacacggatatcggacagaggggcgtcaagctctcaggcgggcagaagcagaggctgtccatagccagggtgtttctaaagaatccgcccatcctcatttttgatgaggccacttcggcgctggacaatgagagcgagaaagtagtacagcagtcgctggaaggactggcaaagaaccggactacttttgtcatcgcccaccgtctcacaacgatccaaaacgcgcagaaaatactcgtgctgacggaggacgggatcgcagaggaagggacacacgaagaactgctcgcaaaacagggagtctatgagactttatattacggcaaacggcgcgggaatgtgcacggcgccggctaagagacatacggggaggaaggttatgaagacaagaaggagaatgcgccaggccatgcttacggtcataatgctctgtacattgtgcgtaagtaccgtgctggcaaagaacgaggagaaaagcagccgggcggatgaggtgacagtattgtttacgcatgatatccactcacatctggatgaattcaaggtggcggacggcaaggtcggaggatttgggaggcttaagacagcgcttgataaggagcgcagcggcaatcccgccacattcgtgtttgacggcggagacttttccatgggaacgctctaccagacggtatatgagacagaagcggcggagctgaccatgctgggccgtctcgggtacgatgcggtgacatttggaaatcatgaatttgattaccggagcgagggaacggcaaatatgtttcacagcgcgcttgagaatgcgcaggacgatccgtcgatcgtgcttccgaaatttgtaaccgccaatatcgactggcagaaaaatgattcaaaagataaccggctcattcagaatgcgctggaggattacggaagcacgccatacactgtcgtggaaagagaaggcgtgcggatcggtgtgttcggcgtgctcggagaggatgcagaggcgtgcgcgccggagagcgggcttaactttgagccgatcgtggacacttcaaaggaggtcgtaaaggagctggaaaaagaaggggtggatatgatcgtctgtctgtcccacagcggcacaaatgaagacgaagacaagtcggaggatgagattctcgcaaaggaagtgccgcagatcgatgtgatcgtaagcgcgcatactcatacgaagctggaggaatacatcaaaagcggcgacacgtatatcgtatcggcaggctgttacggagaatatctcggagaccttaagatgtcgccgacagacgacggacggtgggagcttgaggaatatacgctccatcatctggacgagacggtcgttcccgacgcgaaggtgaatgaagaactggccacatacaaaaaacttgtaaatgaagaatatctgagcaggtttgattatacatttgacaaggtacttgcagaaaacggcgttgcgtttacgcagatggaccggtttgcaggtgaattaaaggaagacccgcttggaagcatcatcgcggattcgtatgtgtatgcggtggaacaggcggaaggcgatgcatatgaaagggtagacgccgctgtcgccccttccgggacgatcagggatacccttcagaaaggagtgctgaccgtctccgacgccttcaacgtatgctcgctcggcataggggctgaccgcattccggggtatccgctcgtgagtgtgtacctgaccggggcggagcttaagacggcggcggagatcgacgtatctgtatcgccgatcatgacgacggcgcagctctatccgagcggcctgcactggacgtacaacccaaaccgcatgatgctgaaccgggtgacggacgccgcgctctatgacgatcttgcgcaagacagtgaaaagacccgaaaagaacttgaggatgataaactgtaccgggtcgtggccggactatactccgctcagatgctcggggcggtggaggacacgtcaaaggggctgcttaagatcacgccgaaggacagggacggcaaagcggtcaaggattttgaaaagcatatcattcatgataaaaatggggcagaactgaaagaatggtatgcgcttgccggatatctggaatcctttgacaagaataatgagggcatatcccggattccgcagcgctatgcaaaagcgcagggacgcaaggaagagatcgacagcaaaaacatcatagagctcgtaaaacagccgaataaattcgcgtttatcgtatatggagctgtcataattatcattcttctccttattttgactgtccggttcttaataaaaaggagaaaaaagaagaaaaatatgatatactaaaaaaatatacttattggaccgtctgtgttcaatgagcagaaaattacagacagaagaaaagaagggaaaatatgatagaaattaattttaaacgcccgcagcttgaagataaggagctcatatctcactattttaaccatcacacgagccggagctgtgagcggacttttgtaaatgtatatctgtgggcaaagcattataaagtggaatttgcggttgtggaagatgcccttgtatttaagagtgagtcgaaaagcggactatcttttgcctatccggccggagaaccaggacaggtgaggaaggcgctggaagtgcttatggagtacagccgggaaagaggctctgcgttcagcctctacaacgtgacgccggataatttcgcgcagttggaggaatggtatccgggacggtttaagatcgagtacagtgagtcggacgcggactatgtgtatgagtctgaaaagcttgccacactgtcgggcaagaaactgcatgggaagaggaaccatatcaacaagttcaagagcacgtatgagggccgctggagttatgagccgatcacgcgggataatgtggaagaatgtttccagatggcgctgaaatggagaaaccagaacggctgcgaggacgatccggacaaaaattcagagatgtgcgttacgctgaattcgcttcgtctctttgaagagcttgagcttacaggcgggctgctcagagtggacggcagcatcatcgcgttcaccatcggcgaaccggtctgttcggacacctttgtcgtgcatatcgagaaggcgttcgcagacatacagggtgcctatccgatgataaaccagcagtttgtagagcacgagtgtatggactataaatatgtgaaccgggaagaggataccggatctgagggactcaggaaggcaaaactgtcctaccgccctgtgttcatggtggaaaagggatttgtgactgaaaaagaagataaaggagaagaagcagaatgatagcagagaagatgaaaaacatggtggcaaacagttcggcgatccgggcgatgtttgaagaaggcaatcgtcttgcaggtatttacggggcggaaaatgtatatgatttcagcctcggcaatccgaatgtgcctgctcctgaggcggtaaagacagcgatcaaagagctgcttgacgaggacgacccggtcgcgctgcacgggtatacgaacagcaacagcggatacgcggatgtgcgcgccgcggttgcaaagtccgtaaacgggcggttcggcactcattttacagaagagaatatcgtcatgactgtaggagcggcaggaggcctgaacgtcattttaaagacgctgctcaacccgggcgacgaggtgatcgcgtttgcgccgtattttggagagtaccgctcttacacgaacaattacgacggggtgatggtggagatatcgccgaacacggcagattttcagccaaaactcgatgaatttgaacagaagatcacgccgaagacgaaggcggtcatcgtaaatacaccgaacaatccgaccggggtcgtctattccgaggatacgatccggaaaatggcggctataatggacgcaaaacagcgggagttcggcacggatatctatctgatctccgatgagccgtaccgcgagcttgtgtatgacaacgcggaagtgccgtatctcacaaaatattacgataatacgatcgtcggctattcctacagcaagtcgctgtcgcttccgggagagaggatcgggtatcttgtgatcccggacgaggtggcggacagtgaagaagtgcaggcggcggccaatgttgccacgcgtatcctcgggttcgtcaatgcgccgacgctgcagcagaaggtagtggccaaatgtctcggggagaagacagatatctcctattatgacagaaacagagagacgctgtatcacggcctgaaagaatgcgggtttgaatgcattaagccggagggcgctttctacctgttcgtaaaatcgccggtggaggacgagaaagcgttctgccaggcggcgaagaaatataacatactgatcgttccgggaagttcctttgcctgcccgggatacgtacggcttgcatactgcgtgtcatatgagacgatcgtaaactcactgccaaagttcaaagaactggcggcagaatattttgcctgaagacaaagaggatgaatacatatgaaagcattcgaacagaatatccgtaaagtagaaccatatgttcccggtgaacagccgcagcgcagggtgatcaaactgaacacgaacgaaaatccgtatccgcctgcgccgggcgtcacaaaggcgctcagagagatggatgcggatcgtctgcgcctatatccggatccagaggcggacgtacttgtgagagaactggcggactattatcacgtcgggaaagaccaggtctttgtgggagtcgggtcagacgatgtactgtccatgtgtttcctgacattttttaattcagacaagcccatattgtttccggatatcacttattctttttataaagtgtgggccggactgtacaagatcccgtacgaatgccagaagctcagtgatgatttccacatggtgaaggaagattactataaggagaacgggggagtgatctttccgaatccgaatgcccccacagcgctttacgaggagcttgatacggtagaagatatcattgcccacaatgaggacgtggtcgtcattgtagatgaagcgtacattgattttgccggacgctctgccctggagctgctggatagatatgacaatctgcttgtggtgcagacgttctcaaaagcccgctccatggccggcatgcgtatcggctatgccatcggcagtcctctgctcataaaatatctcaacgatgccaagtattcatttaattcttatacgatgaatgcggcttctcttgtgtgcggggcggaggccgtgaaagacagggcatattttgaggacagagtccgcgcggtcgttgagacgagggaatgggcgaaggtggaacttgggaagcttggattccggttcccggactccggcgccaactttatttttgccacgcatcccgaccacgatgcgaaagagctgtttgaggcgctgaaagcaaacgatatctatgtccgttactggggcggtgagcggatagaacagtacctgaggatcagcatcgggacgagggaagaaatgacagcattgttttcgtttttaaataaatatttgaacagataagggagaactatatgacagaaacattagtgcagaatattattgacgtgctgggcggcagcatggggaaagaggcgatcgtatttatcatatccatgataccgatcctggagctgagaggggcgcttctcgtggcaggtcccctgctcggtgtaccggttgccaccgcgataccgctctgtattatcggaaatatcattccggtgccctttattctctggctgatcacacctattttcaactggatgaagggtacgaggaagctgaagcctatggtggataagctggaggcaaaagcgatgagtaaaagcgataagattgaaaaatatgaattctggggacttgtactgtttgtcggcatccctcttcctgggaccggggcctggaccggggcgctcatcgcgtcgctgcttggcgttaagtttaaaaaagccttcccggctatcatattgggaattttaatggcaacagtcattatgtggtttatcagctatgtgctgctcggaggtgtaaatctgttaggataggaggagattatggaatattctcatgagatcataatgccaaatgacgacatcccgtttaaaatgtttgtgtttgaaggaaggaacggcaattatatgcgcgagaagcactggcaccgttccattgagatatttgcgctctttgagggggagctggagttctacgtcaatgagctgagatattccctgaagccgggagagtttatgcttgtcaattcaaatgagatccattccattcactccccgaagaagaatatgaccattgtgcttcagattcctcttgccacatttgaaaaatactatacagaggaacgttttatttatttttcccacagctcaaggcttcaggacgaagaagtcatgaagctgataggagatatgtatgagacatatgccaagaagaaatgtggttatgaattaaaggttcagagccagttttatatgctcatctatctcatggtaacaaagtacagggagacagatgttgacggtgagatggtgaagcacaaccggaagctgaataaactctctacgataacggcgtatatgaaagataattacgcaagggatctgtctcttgacagcctgtcccagacattcggctattcccctacttacctgtccagaatgtttcagaaatatgccaggatgaattataagacatacctggacaacctgcggctggaacacgcatacaaagatctcgtcaatacggaacaggccataggagagatcgccatacagaacggctttccgaacagcaagtcgttctcaaaggtattccagaagaaatacggaatgctgccgagtgaattcagaaaggaacataatacttgatcccggccgtcttacggcgggaatacgacaccgatgctggcagtaaaatgccagctcgttttattttatgtgtgtatccggttccgtctgtgagcaagatcttatgcattgccggcggcagcggcctcaaaaacggaagcaaatgctcaaaagagggcaaaaaaagaccataaactagctaaatatttggtcgtagcaaaatataaaagttgttataattcattatataacagtgcggcagaagagttggctgctgctgactaatacctttcacgggggggacacgatatggaaatacagaatgtaaaagacgaagcttttaaaacatacggccgggtgctggaagaatatgacgtatgccggctgaggaaggagatggagcacacgccgctcccgtcggacagcgttatctatgtaccgtccgtagaagaactggaggcactgaccgctgcggagtgcttcagggatatggcgtacggcggactgcccattcaggtcggctactgcaacggcagcaatcatgcgatgaacgcgctggaataccaccgctgctcggagataaatgtagcggtgacggacctgatcctgctgctcggcagacagcaggacctggaggcggactatacgtacgatacttcaaaggcagaagcgttctttgttccggcaggtacagtgctggaagtgtatgcgacgacgcttcactatgcgccctgcacggcatccggaagcgggttccggtgcgtcgtcatactgccgaagggcacgaacacggaactggatttcctcgtgtccaaagaaggagagggaaagcttatgactgccaggaacaaatggctcatagcccacagggaagcggggatcgaaggcgcgttctgcggtctgaaaggaagcaatatcactgtatagatcacaatttaccaacaaggaggatgtaagaagatgaataacatgccagaagtaaagatcggagttgtggccgtcagccgcgactgttttccggagagtctgtccgtgacaagaagacagaacctgatgaaagcctacacggacaaatacggagaagaaggggtctatgaatgccccgtctgtatcgtggagagcgagatccatatggtccaggcgctggaggatgtaaagagagcagggtgcaacgctcttgtcgtatatctggggaactttggacccgagatatcggagacgctgcttgccagacatttcgacggcccgaagatgttcatcgcggcagcggaggagacaggcgatgacctcgtacagggcagaggagacgcatactgcggcatgctgaacgccagctataacctgaagctcaggaatgtacaggcatatataccggaatatccggtgggagacgcttccgactgtgcggacatgatccatgaatttgtgccggtagcgaaagcgctcgtcggactttctaatctgaagatcataagctttggcccgcggccccttaatttcctggcgtgcaatgccccgatcaagcagctttataatctgggggtagagatagaggaaaactcagaactcgacttgtttgaggcgttccataaacatgcaggggatgagaggataccggctgtcgttaaggagatggaagcagaactcggcagcggcaacaagaagccggagatccttcagaagctcgcccagtatgagcttacactgaaagactgggtggaggagcataaagggtaccggaaatatgtggccatcgcaggtaaatgctggccggccttccagacgcagttcggatttgtcccctgttatgtgaacagccgtctgacggcacagggaattccggtgtcctgcgaggtggacatctacggggcgctgagcgagttcatcggaactgttgtgagcggggatacggtgacgcttctggatatcaacaatactgtgccgaaagatatgtacgagcaggagataaaaggtaagtacagctacggcctgcatgatacatttatgggcttccactgcggaaatacggcggccgggaaactgtcattctgtgagatgaaatatcagatgatcatggcgaggacccttccggaagaagtgacacaggggacgctggaaggagacatcctgccgggagacatcacgttctaccgtctgcagagtacggcggacaatgttctgagagcttacatagcacacggggaggtacttccggtggccaccagatccttcggcggggtaggtgtgtttgcgattcctgagatgggccggttctaccgtcatgtgctgatcgagggcggttatccgcatcacggggccgtggcattcggtcattacggaaaggctttgtttgaagtgttcaaatatatcggcgtgccggtggaggagatcggatacaatcagccggcaggagtgagatatcctacagagaacccatggaggtagcgttatgttatacataggaattgatttagggacatcggcggtaaagcttctgctgatggacgaagaaggaagcataaaaaatatcgtatccaaagaatatccgctgttcttcccgcatcccggatggtctgaacagcatcctgaggactggtacgaaaagtccatggagggcatacgggaactgacggaaggttacgacaggagcaaggtggcgggtatcagcttcggcggacagatgcacggtcttgtggcgctggatgacagggacgaggtcatccgtccggctattctatggaatgacggaagaacaggggaagagaccgattatctgaatgatgtggtcggcaaagacaggctgtcacaatatacggcgaacatcgcctttgcaggttttaccgcgcctaagatcctctggatgaaaaaaaatgagccggagaacttcgccagaatggcaaagatcatgctgccgaaagattatctggcgtaccggctgtccgggtcattctgcacagacgtctcggacgcgtccggcatgctgctcatggatgtgaagaaccgctgctggtccagagagatgatggacatatgcggcataaaagaagaacagcttccgagattatatgagagctacgagatcgtcggaactttaaagaaagaagtggccggggagcttgggctctccgaggatgtcaaagtgatcgccggcgcgggggacaatgcggcggccgcagtcggtacgggaacggtcggggacggcatgtgcaacatttctctcggaacttccggtacgatctttatctccagcaggaaattcggggtggacgaacacaatgcgctccattcttttgcgcatgcagacgggaattatcatctcatgggctgtatgctcagcgccgcgtcgtgtaataaatggtgggcggaggatatactgaagacgaaggattacgccgcggagcaggaagcgatccatgcactcggtgagaacaatgtattctatctgccctatctcatgggagagcgctctcctcacaatgacccgaaggcgagagctatgttcatcggaatgtccatggatacgacgagagccgacatgacgcaggccgtgctggaaggggttgcgtttggtctgcgcgattcccttgaagtggcgagaagtctcggtgtcagcatagagcgcacgaagatatgcggagggggcgcaaagagtcctctctggaaaaagatcattgccaatgtcatggatatgaaggtggatgtgatcgagagtgaagaagggccggcgcttggcggcgccatgctggcggctgtcgggtgcggcgaatacccggatgtggagacgatcgcgaagaagatcgtaaaagtagtggacacagtggagccggagccggaactggtggagaaatacgaggaaaaatacagccggttcaaaaagatatatccgacagtaaaatgtttataccgataagaagctgtatgataaggacggcaggaatgccgatacggaagcgggcgtgctttgttttgtgacggaaacagagcatgcccgtttccgcgccgaggctgccgccgatgagcgccgtgaataaaagagtgcgttccggtatgcgtctttcccggtttacagcccttgacttgtccgctccaaaaagtaaaaatgaaagtacgttgacaaatataagataaaaaacaaagaatgccataatatgtcctccccgtgcattttaacatatccgggctgttttcggcaatgcggtaaattacctgtcagttacctgtggaaaatcagtcccggttatgatagaattatctggtaccctcagcccgcatgggcttaaatataatatcggaaataaggagtaaaggttatggacaagatatatgatgtaacggcacttggtgagatgctgatcgattttacgctgaatggacagagcagtcaggggaataatatgtttgaggcatgtccgggcggcgcgccgtgcaatgtgctggccatgctgaacaagctgggcagaaagaccgcttttatcggaaaagtgggtcaggatcagttcgggcgccttttgaaagatacgatagatgaacttggaattgagacaaagggtcttgtcctggacgaacagatccacacgacgcttgcctttgtgcatacattcccggatggtgaccgcgagttttctttttacagaaagccgggggcagacatgatgctgacagaagaagaggtggactacggcctcatacgtcagtcaaaggtatttcatttcgggacgctttccatgacagatgaaccggtgatgagcgcgacgaagaaagcgctcgaaactgcgaaagaagcaggatgcctcatctcgtttgatccgaatctgcgcccgccgctctgggaatcgctcgataaggcgaaggaagctatggagttcggattccgctattgcgacatcctgaagatatccgacaacgagattcagtttgtgtcagggaaagaagattatgatgagggcatactgtatctgaaagaaaaatataagattccgctcatcttcctcactatgggcaaagacggaagcagggcgtactataagggaacccgtgtggaacgcaaagggttccgggtgaaagcgatagagacgaccggcgccggagatacgttctgcggctgcgccataggaggaatactggatcatggcctggacatgctgacagagagccagctgggcaatatccttacatatgccaatgcaggcgctgcgcttatcacgatgaagaagggagccatacgctccatgccggagcctgcagagatcgaggcattgctccacaagtaaaaagacgcagagggataattatgggattacgacgaatgctggccgtctgggcggcaaaaattacagaaaagatcagtgtgcacattttccacaggcagggtgtgacatgggccggaaagatcgcgctcaggatctgcccgtccgtgctgaaggaactctcgggtcaggtgagaaaaggcatctttatcgtgtgcggtacgaacggaaagacaacgacgaacaatatgctctgcgcggcgcttcaggcagagggaaataaagtgatctgcaatcacaccggttccaatatgctcaacggcgtggtggccgcatttgtgctcggagccggaaacagcggcaggctcgatgccgattacgcgtgcatcgaggtggacgaggcatccacaagaaaggtttttcctcattttaaaccggattacatggtgctgacaaatctgttccgcgaccagctggaccggtacggggagatcgacatcacgatgaatatattgaaggaagtaatgcgcacagctcctgagatgaaggtgatcgtaaacggagatgacgcgctgtcggcgtatcttgccatggaaagcggctgccggtatgtgacttacggcatcagtgaacaggttgtgacggacaacagtctgaatgagatacgggaagggcggttctgcaaacggtgcggcgcgccgctttcgtataagttctatcactacagccagctcggggactacgcatgtacggaatgtgacttcaggcgtcctgacatacagtttgacgcatcagaggtagaggtgggcggcaggcttgcctttacagtggaaagcaggaggatttccgcggactataaaggcttttacaatgtctataatattctggcggcgtatgcggcaggccgcacagcaggccttaagcttgaacagttcaaccgtatgcttgaaacgttcaatccggaaaacggacggatggagagatttacggtaggggagaccaagatccttttgaatctggccaagaatccggcagggttcaaccagaatatttctgccgtcatgcaggatgcttcccggaaagatatcatcattgtgatcaatgacaacgcccaggacggcacagacgtgtcgtggctgtgggatgtggactttgaccggtttaaagaagacgacgttaattccgtgacggtcagcggtatccgctgccatgacatgggactgcgccttaaatatacggacatattgaatgcgatacagccggacgtggaaaaagcgatctgcgaaagggtggaaaacggctgcgggaacctgtatgtcctggtgaattatactgcacttttcagtacgagaaatgtgcttaagagactggagggagagcggtgatggataagaaagatatgaagcttacgatcggacatctctatccggaccttctgaatctgtacggtgaccgcggcaatatcgcatgcatgatgaagcggtgcgcctggagggggatcgaggcccggacggttgagtttaatacaggggatgagatcgactttcaggaccttgatatcgttcttcttggcggcggttcagaccgggagcagaggatcgtctgtaagaatctgctcgcgatccaggaaaagttcaaggaatatgtggaagataacggtgttgtcatagctgtctgcggcggttatcagctgcttgggaagtattataagacagaggaagggacgatcgaggggctggacctcgtggatatatacacagagcagggggaaggacgcctgatagacaacatcgtgctggagagcagcgtgtgcagcatgcctgtagtcgggtttgaaaatcacgggggaaggacgtttatcaacgataacacaccgttcggcagagtgctgtacggcgcgggaaacgacggggagagcgggtacgaaggagtcgtatataagaatgtgatcggcacgtatctccacgggccgctgctgcctaagaacccggagatctgtgactggctcatccagagagcgctggagcgccggtacggatgtgcagaacttgagtctctggacgacagcagggagaaggcggcaaacgagtatatttacaacagatttgttaaacaataaaggcaggggaagttcaggaatcagcctggtacgtatcgcgcagttccataagatggatatatttcagcacgtctctttttgattcggcggagaggccgcggtacttttcaagaaagttccgttccgtgaccggctccggcacggactgtgacggagtgatgctgatcgtttcctccccctccagcagataatcgacagagacgtggaagaggctggcgagcgcagtcagcttttcatgggaaggctgtctgttctttgtctcgtatccggcgatcgtggagcgcgccacattcagccggcgtgcaacataatcctgcgtcatctcgtttttcagacgcagggctttcaaccttttctcaaatgacataccgcaacctcctctgtattatgagatttattttagcaagtgttcccaaaaagtagagattatgtgccaaatatcaacaaaatgttgcggtaaagttccggtgcggaacattgtttgatcacattgacagagttgaggaaacaacttataatttaaataaggcagaaataaaagaaccgagaggactggaatagatgataattgcaaaaaacgatgaggcaaaaagaagtaaaatatggacggtagtgacactggtaagttcagtgctcatagtattgatcgccgtttttcttctgaccaagctttttacgacaaacccgctggaaggcacgtgggaggacgaggacggtaactttgtgcttaccgtaaaaggaaataattcgcttacagtgaatgttccggatcttgccgaggattacagcgcagacattaagatggactatgtgctggacaaagatgaaaagacagtcacgatcaagatgaatgattccgaggtggagaaagcggtgaaacgctccgacgggatcctgacagaggagacacttgagaatgctctcagttcagtcactacgacgtttgactacagtgtggacagggataccctgacgctgacggaacgcgagtacggcgagcagatggtgttcacgaaaaaataatacagtcagttatccctctattgacgccgggaaagaaaggtgaagaatagaggggttttattttaatgcgaggtgtgctatgaaaagagaagagacgaaaaaaattaagatcggaaatgtgtatataggagggggaagccctgtcgccatacagtctatgacaaatacaagaaccgaggatgcaggcgcgaccgtaagccagatcctgaagctggagagagcaggctgtgacattatacgctgtgcggtgcctacgatggaggcggcggaggctctttcggagatcaaaaagcagatacatataccgcttgtggcagacatccactttgactaccggcttgccatagccgcgatcgaacacggcgcggacaagatccgtatcaacccgggcaatatcggcggggaagaccgggtgagagctgtggtggagaaagcggcagaatatcatgttccgatccgggtcggtgtcaacagcggttcgctggaaaaacatattctggaaaagttcggcggagtcaccgcagaagggctcgcagaaagcgcgatggacaaggtgcatatgatcgagcgtatggggtacagtgagatcgtggtgagcatcaaatcatccgatgtcctgatgtgtgtgaaagcgcatgaactcatagcaaaggagtgtccgtatccgcttcatgtcggcatcacggagtccggcacactgctgtccggcaatatcaagtcatccatcgggcttgggctgatcctgagcaaagggatcggtgatacggtgcgcgtatccctcaccggttcccctctggaagagatcagatcagcaagactgatcctgaagacgctcggcctccggacaggcggcatagaagtcgtgtcgtgccctacgtgcggcagaacaaggatcgatctgatcgggctggcaaacaaagtggaagatatggtcgcggatatcccgctcgacatcaaagtggccgtcatgggctgcgtggtgaacggccccggtgaggcgagagaagccgacatcggaatcgccggaggtgtcggggaaggactgctcatcaaaaagggcgaggtcgtaaaaaaggtgaaagaagaagcgctgcttgagacgctgagacaggagttgttgcattgggatgagtaagccattttttgaagtatttcctacattaaagacagatgaagatatgaaaatgttattttccggcgtggatgtcctgaaggtgacgaccaactcggacagaacatttatcaaagtacatatactgagccgtcatctgctccagaagaaacgtatctatgagatggaaaagatgctgaaggaccagctgttcgggcacagcaggataagtacggagcttgtggagaggtatgaactgtccgcgcagtatacgccggaaaatctcatgaatgaatatctggacagtatgatcctggagctgaacacgagaagtgttgtggagcgcagcatgctgcagagcgccagatattcttttgaggacggcaatattctatgcctggagctgacagataccattgtggccaaggggaagaaagaatcgctcacctcgtacctggagaaagtgttcgcggacagattcgggcgcagggtggaggtccgtgtcgtctatgaggaggcaaaggacagcaagctgaaatacaatgatgtgaaaatacggcaggaggttgaggcgatccttgaacagaccgccgccgttcatcaggagaaagcggaacagaagaaggcagcggaggagaagaaagagactcccgctaagccgggccggcaggagaagagagacaaatacgcgttcgggagttacaggaagccgtccgatgacccgagtcttatctggggaagaaattttgacgatgagacgatcgagcttgagcaggttgcaggagagatgggagagatcaccatacgcggcaaagtcatcagctttgacacgagagagatccgcaacgaaaaaacgatcgtcatgtacgcggtcactgactttaccgatacgatcaccgtaaaaatgtttgtgagaaacgaacagctcccggatattctgggtgatatcaaaaaaggagcatttctgaaaataaagggcgtcacgacgatcgacaagtttgacggagagcttacgatcggttctgtgactgggatcaaaaagatagcggattttacagaatcaaggaaagacactgcgccggaaaagagggtggagctgcactgtcattccaagatgagcgatatggacggtgtgacggaagtaaaagatctcgtgaaacgggcgcacgactggggacacaaagccatcgccatcacggatcacggcgtggtgcaggcgtttcccgatgcaaaccactatatcgagacgcttgataaggacgatccgtttaaggtcatatacggggtggaaggatatctcgtggacgatctcacagacgttgcggtcaatgaaaagggacagacactcgatgatacattcgtcgtatttgacctcgagacgaccgggttcagttccatcaaggataaaattatcgagattggcgctgtgaaagtggaaggcgggcggatcacggagaagttcagcacattcgtcgatccgaagatcccgatcccgttccgcattacccagctgacgggcatcacggaccagatggtcatggacgcgcctgagatcgaagcggcgcttccggcgtttctggaatttgccggggacgctgcccttgtggcgcacaacgccggattcgacgtgggattcatagaccagaactgccggtatatggatatcactccggattttacagctgtggatacggtggctatggccaggatactccttcctacgctgtctaaattcaagctgaatgtagttgccaaggcgcttaatatttcactggaaaaccatcaccgggcagtggacgacgcgggggcgacagcggagatattcgtccggttcgtggatatgcttaaggagagagggatccatacgcttgcaaggctcaaccagttcggttcatcgaacgccaacgctataaggaagcttccgtcgttccacgtcattatactggctaaaaacgagacgggcagggtcaacctgtataaactgatatccaaatcccatctcgattactttgggaggcagccgagaattccaaaaagcgaactgtccagacacagagagggactcatagtgggcagcgcctgcgaggcgggagaactgtaccaggcgattctggacgacaagtctcaggagcgcatcgcacgtatcgtgaacttttacgattatctggagatacagccgcttggcaacaataaatttatgatcgcaagcgaaagaatctccaagatacattcagaggaagatctaaagaacgtgaaccggacgatcgtaaagctcggggaaaagttcaggaagcctgtggtagccacgtgtgacgttcattttatggatccggaggatgaagtgtaccgcaggatcatcatggcgggcaagggcttcacggatgcggacgaacaggcgccgctgtatctgcgcacgacggatgagatgctggcggaattcgagtatctaggctccgcgaaagcgagggaggtcgtcatagacaatccgaataagatcgcggattctgtggaaaggatatccccggtgcgtccggacaaatgtcctcctgtcatcccggattcggaccagatgctgcgcgatatctgttacaataaagcccgttccatgtatggggacgaacttcctgaggtcgttacggagcggctggagcgggaactgaactcgatcatatccaacgggtttgccgtgatgtacatcatagcccagaagctggtgtggaagtctaacgaagacgggtatctggtaggctcgcgtggttcagtcggctcttcctttgtcgctacgatggcggggatcacggaagtaaatccgctgagtccgcattactactgcaagagctgtcactacagtgattttgattccggcgatgtgcgggcgtatgcgggaggatgcggctgggatatgccggataaagtgtgccctgtctgcggggagaagctcgtaaaagacggcttcgacattccgtttgagacgtttcttggctttaaaggaaataaagagccggacattgacttgaacttttccggggattatcagagcaatgcacataaatatacagaagtcatattcggcgacgggcagacgttccgggccggtacgatcggaacgctcgccgataagacggcctttggttatgtaaagaattattttgaagagcggggacagaggaagcgcaactgtgagatcgacaggatcgtccaggggtgcaccgggatcaggaggagcacgggacagcatccgggcggcattatcgtgcttcccctcggggaggatattaactcctttacgccggtgcagcatccagccaacgatatgacgacggacatcgtcacgacacattttgattaccactctatcgaccataacctgctcaagctcgatatactcggccatgacgatccgacgatgatcaagacgctggaggaattcataagctctccggcgatggaaaatgaatacaatgagacagacaaccgttttgacgccacaaagatcccgctggatgacagaggagtcatgtcgctgtttcacgacacttcagcgctcggcatcaagcctgacgatatcggaggctgtccggtagggtgcctcggcatccccgaattcgggacggaatttgtagtgcagatggtggtggacacgaaaccgcagacactgtcagacctgatacgtatctcagggctgtcacacggtacagatgtgtggctcaacaacgcccaggagctgatcaggagcggaaaggcgacgatctccaccgccatctgtacccgtgacgatattatgacttacctgatcaataaagggatggacagtgagctttcctttacgatcatggagaaggtaagaaagggaaaagggctgacgccggaatttgaaaaggcgatgaaggaggcggatgtgccggactggtatatctggtcgtgcaagcagataaagtatatgttcccgaaggcccacgccgcggcgtatgtcatgatggcataccggatcgcctactgtaagatcaattatccgcttgcgtactacggcgcgtattttgggatccgcgctgatgcgttttcttatgaattaatgtgccagggaaaggaaaaactaaagttctatatagaggattataagcgccgttccgattccctcagcaaaaaagaacaggatacgatgaaggatatgaggatcgttcaggagatgtacgcaagaggctatgagtttatgccgctggacatttataaggcaaaggcgtccaagttccagatcgttgacggcaggctgatgccgccgctctcgagcatagatggaatgggagacaaggcggccgaggcggtggaggaagcggccaaggacggcccgtatctgtccagggatgatttcaggcagcgcacaaaggtcagcaagacagtgatcgattatatggctgatatggggctgttcggggatattccggagtccaaccagctgtcgctgttcgacctgagcatgtagcggccaaaaaaagaggaatgtatcagaatggcaggtttgtgaaaatgagtggaaaacaaaaatataaagggatcttgtatatcgtatgttctgcgttctgcttttcgcttatgaatatgttcgtgcgtctgtcaggggatctgccttccgtacagaaaagcttcttccggaatctggtggcgttctttttcgcgcttatcatgatcaggcgggaggcggttccacttaggtgcagggcgggaaatctgaagtatctgctgcttcgttccctgtttggcacagttgggattctgtgtaatttttatgcagtggaccaccttgtcctggcggacgcgtcaatgctcaacaagatgtctccgttctttgtcgtagtcttcagcatttttatactgaaggagcgggtgacggtgccgcacatgctgtttgtgggcggcgcttttgcgggaagcttgtttgtgataaaaccgtccttttcaaacatggacctcctcccgtcgcttatcgggctggccggcggactgggagccggcgcggcgtatacgtttgtgcgcaaattgagcttaaggggggaaaagggcccgctgatcgtctgttttttctctgccttttcctgcctggccaccttgccgtttctcatatatggctatgagcctatgagtctgaggcagatagttctgctcctttttgcaggtctcgcggctgcgggagggcagtttgggatcacggccgcctacagccatgccccggcgcgggagatatcggtgtacgactattcgcagatcatgttttccgccctgctcgggttttttgtcttcggccaggcgccggatgcactcagctggctcgggtatgcagtcatctgtacgatggcagttctgatgttcttttacaatttaaagagagaaaagtaacaaaagcaggcggcatcttatactttatactaaaggatgaaaggaagtgcagattatgaagttgagatgctgtcatgaaaatagacctccggcatgctgtccgccgggaccgcctccggtgccggaagacaggccggatttttttgcgcagttcggcgtgtacggaagcccggaatcagggagcagtcttccgtttattcagctgtttaaagaaggagagggcatccgccttgacggggatacggacatactgctggaacctggctggctttatcttgtgaactatctgttccttgcgactccggaaccggacggtttcatgcagatcattccgagaataaacggaagcctgaggggcttgtattctttttttgcccctacgggagcggagaagaatacttcggcggccggaagctttacgacgaatgaagccgcggcctcagaggcgcggctgtcgtttcacctgacatatccctccacgacgcgcaatatagatatttcaggcgcggtgtctgtgacgccgctcatacggataaaaaacagcggaagctgacttgacttttggggaagagtgggctatgctgattaaagtcacgataaaataattaaggaaaggcaggcgaatctgcatggatgttcattcgggacgaagttgtaacttaacaatgacaatcggatatggcatgtacgtggagtctgccctttttgaacagttcttttgacagattttatataaaagagcgttttcttgtaatagattcaaagcagagcgggactttattttgtgctgtctgtccggtatgagggcggacagcatttttctgtccgggacaaggaggcgcgagatgataagaaacacactgaaagaattattagacgcaaagaaatacagagagatccacggtatgctggatgcatataatccggtagacctggcggagcttctgatggaactggatgattcggagctggcggtcgtgttccgtatgatagacaaggagaaggccgcggaagtattttcctatatggatgacgatcaacggcagacgctgctggaaggattcacgagccaggagatatcctatatactggatacgatgtatactgacgacgcggtagattttctggaggatatgccggccaacgtagtcacaaagctgttggaacatgtaagcggagagacgcgggcggatatcaaccggcttttgaaatatccggaagacagcgcgggaagcattatgacggtagagtatgtggagctgtcgccggagatgacggtggggcaggcgctggcaaagatacgccgcgtcgggatcgagagtgagactgtctatacctgttatgtggtggagcgcaaaaagcttatcgggatcgtgacggccaaggcgctcatgaccaacgcagagtctgtccggatcgccggacttatgcaggataattttatctcagtgcagacgacagacgatcaggaggatgccgcgaagctgttccgcaaatacggtctcatagcgataccggtccttgaccatgaggagcggctggtcggaatcgtgacctttgacgatgcgatcggtgtcctgacggacgagacgacggaagatatgcacaagatggcggccatgacggcaaatgaagagtcttatcttaagacgggagtattccagcatgccaggaaccggataggctggctgctgtttctgatgttttctgccaccataaccggtacgatcatcactcattatgaggcggcgatcgcttccgttccgctgcttgtatcctttataccgatgctcacggatacgggcggaaactgcggatcccagagttccacacttgtcatccgggggctggcggtagacgaactgcatttttcagacttgtttaccgtcgtctggaaggaattcagggtatcgctcgtagtgggaacggcgctggcggcggccaacggtatccgtatctatgtgatgcaccgggatctgggacttgcggctgtgatcggtgtctctctcatcggcacgatcattgtggcaaagatggtggggtgcatgctgcccatattcgcaaagcagctcagactggatccggccattatggcagcgccgctgatcactacgatcgtggatacatgttctattatcatcttttttaagatagcgacaatggtgttccatctataggcggataaaaaggagacggtagttatgaaaatagacaggcttatcgggatattatctgttcttctgcagcaggaaaaagtgacggctccgtatctggccgacaagtttgaagtgtcgagaagaacagtcaacagagatatcgaggacctgtgcaaggcgggaataccgctcgttacgacgcaggggagcggcgggggcatctccatcatggaaggatacaaactggagaagacgcttcttacatcggcggagatgcaggccatactgaccgggctgaaaagcctggacagtgtggccggcacgagccgctacaggcagctgatggagaagctggatgtaaggagcactacacttgcgcccaacagccatattctcatcgatctgtcctcctattacaagacaacgctggccccgaagatagagatgatacaggacgcgatagagaacaggagatatataacgttccactattatgccccgaagggggagagcgtcagaaagatcgagccgtgcctgctcgtgttccagtggtcgtcgtggtatgtccgggggtactgtacggacagggaagatcaccgtctgttcaaactgaaccgtatgctggagcttaaggtgcttccggaacaatttcccgagcgggaagaggagccttacgagctggacgcggactctgcgtatgacagacagataccggtaaaagcagtattcgtgccggagatgagatggcggctcattgaggaatatggtgccgacagctttacggaacttgaggacggcagactgctgttccagtttgattttgcggatgaagagaatatattcagctggatactgagctttgcagataaggtggaactgctggagccggcccggctgcgcgcccgccttctgaacatcgcagaaggtatcaggagcaaatataaggacaggcagtaacaaagctgtcattgcgcgactggtgtttatagaccggcgctgaagatgagaggaatagaccgtctcccatgatttcacattgaaatatgggagatttcttattataattggacttataatgaaatacggaagggatggatgacaatgagaagaccaaaacgggaaatcaaggatatggcggagatatgcacggtgatcggcgagtgcagtgtatgccgtctgggactcaatgataagggaaacgtatacatagtgccgatgaactttggttatacatgtgaggacagaaagcttacgttttatttacacagtgccaaagtagggagaaagatcgaggtgctgaaggaaaatccggatgtatgtgtagagctggactgcagacacggcctgatgtccgcggacaagccgtgcgggcacagctatctttttgcaagcctcatcggcagcgggaaggcctgtctggaggaagacgcggatgaaaaacggaaggcgctgcaggtgatcatgaagcatcagacaggcagagactttacggactttgatgaaaaatgggtcaacgccgtggccgtcataaaggtggagcttgacgcttacacgtgcaaacaccatgacggcagcaactgacaggaagaggtgagcatatgtggattctcacgggtctgttcgcggtattgtccatcgtcctgctctccggcaggggcagttttcttatcgcaggttataacacggcggacaaggaagagaaagcaaaatatgatgaaaagaagctctgccgcgtcatgggagcgggcatggcggtcattacggccattctgctgctctgcacgctgtatgagtttgatctgccccggggcctgcggtggatcctgcccgccggcatcttcggcgttgtcatctttcttgtcatcgccacaaatacgatctgccggaccaggacgcccgcggccggcacgaaagagaggaaaaaggcggcgctgacgacgaaggtcactgtggcagttctcgcggtaacatgtattttggtagtctctgtgctttatacgggagatgtcaaagtacagttcgagaaggactatatgaatatccatacgtcggtgatcggcagcaaaaaggttggatatgaggagatcttatcggtcgcctatgaggacagtatggacatcgggaggcggaccggaggcatcgggagcttccggctgcaggccggcagttttaaaaacagtgaatttggagcatatcatctctactcctacacagactgcagtgaatatgtcgtcctcgaaacggctgacgggtaccttgtggtcaacggaaaaacgccgtcaaagacgagaaatctgtatcatgatatttctgaaagagccggttttttcgcaaattaatgctttaatctgtgaaagtaatgtgctatactaaaaaaagcatgtatggtatgaaggaggaaataacatgatttgggcgaaagaagagaccctgccgagagatgagatcgagggtatccagcttgagaagcttaaggaaacggtgcgctacatttatgagaagtcggcgccgtaccgccggaagatggatgaggcgggcgtaagaccggatgatatcggaagtctgacggatctgcagaagcttccatttacatataaggcggatttcagggataattatcccatgggactttttgcggtggataaaaaggagcttgtgcgttttcatgccagctccggcacgacagggaaaccgacggtggtaggttatacgaagaaggatctggacgtgtggctcaacaatgtggcgaggatcgcctgtatgggcggcgccacaccggacgatgtggcgcagatcgctttcggatacggaacgttcacaggcgcgctcggactgcacggaggcctggagaagttaggcgcttccgtgataccgatgtcttccggaaatacgaagaaacagatcatgttcatgcaggacatggggacgacgcttcttgtggcgacgccgtcttatgcgctgcatctcggggaagagatcagggcgagagggcttgacccgtccaaagacctgaaggtacatatagggctgttcggcggtgagggaatgacggagccgatgagagacgagatgcataaggtatggggagagcagttcctgtgcacccagaactatggcatgagtgagctgtgcggcccgggcgtggcaggagaatgtgaaagtctgtgcggcatgcatgtgaacgaagactggttcataccggaggtgatcgatcctgagacgggtgaagttcttcctccgggcgagcatggcgagctggtcgtgacctgccttgggaaagaagcgcttccgcttgtgagataccgtaccggggatctgacaaagcttatgtacgagccgtgcgcatgcggcagaacgaccgtgaggatggagaatctctccggccgggcagacgatatgcttgtgatccggggagtcaatgtatttccgacgcagatcgaggaagttctgctgcaggttccggagataggaccccattacgagatcgttgtagagcggaaaaaccgtctggatgtcatgacgatcacggttgaattgatagatgaccgtctgctggacagctacagtaagctgagcgaactggagcagcggatcaaaaagggactgaaagcacagcttggacttgcgacgcagatcaaacttgtcgccccctattctctgcagagatttgaggggaaagccaagagagtgacggatatgagaaaggatggactataagatatgtcagagggaaagaaagtaataatgctcggaaacgaagcgatcgccagaggagcgtatgaggccggagtgaaggtttcagcagcttatccgggtactccgagcacagagatcagtgaatatctcgtacagtataaagatgagctgtactgtgaatggtcgccgaatgaaaaggtggcgacagaagtggcgatcggcgcttctgtttcaggcgtccgttccatggcctgtatgaagcatgtcgggttcaatgtggcggccgacccggcgtacacggtttcctacatgggtgtcaacgggggcatggtcatcgttgtggcggatgacccgggactgtacagctcccagaatgagcaggacacccgcatggtggcccgcgcggcacagctgccggttctggagccgtccgacagctctgaggctaaggagtatatgaaggccgcgtttgagctgagtgagaagtatgaccgtccttttgtattccgcatcacgacgagactcgcgcattcccagggacttgtagagcttgccgggcgggaggtgccggaagacagaccttacgtcaaagatgtcaaaaagacagttatgatgcccgggaatgcgaagctgcgccacgtggagatcgaaaaacggaatctggaactggccggggcggcagatacgctgccgatgaatacggtggagatgaatgatacaaaggtgggcgtcatcacaagcggtatcccataccagtatgtgaaagaggcgatgcccgatgcgtctgtattaaagcttggcatggtcaatcccctgccgagaaaaatgatcgaggattttgcttccaaagtagagactctgtatatcgtggaagagcttgacccggtcattgaagagcaggtgaagtcatggggcataaaagctgtcggcaaagagatatttaccgtacagggagaatacagcgccaacatgatccgccgggcggttctcggacaggagctaaagaccgccgctcccaagccggcgccgatgcgtcctcccatattatgtccgggatgtccgcaccggagtgtgttttacgtactgcagaagcttaagatgcacgcggccggagatatcggatgttatacactcggcgcggtcgcgccgcttagcgtggttgatactacgatctgtatgggcgccagcatctccagccttcacggaatggaaaaagcgaaggggaaagagtatatcagggactgggtcgcggtgatcggtgattctactttcttacatacaggtatcaattctctgatgaacatgatgtacaacaatgcctcgggcacggtcatgatactggataattcaacgacgggtatgaccggccatcaggatcatgcggccacaggaaagacgctgcagggggatccggcgtatgccatcgacataccgggactttgccgcgctgtcggtgttaaaaatgtggtggaagtcaatgcgtttgatatagagacgcttgaaaaagtcatcaaagaagagacggccagagatgaagtgtccgtcattatcacaaaatcgccgtgtgtgcttcttagcaaagcgaagaagccggtctacaccgccctcgaagacaagtgcagaaaatgtggaatgtgtatgaaaccaggatgtccggccatgacgaaaaatgaagacggaacgatacatattgacgatacgatgtgtaccggctgcggtttgtgtgaggacttgtgcaaatttgacgcgatagaatcagtaaaggcaggtgacagataatgacggcaaaaaacataatgatagtaggcgtaggcgggcaggggacactgctcacgagccggatcctcggcggacttgccatggcgctgggatatgacgtcaagctttcggaagtacacggtatggcacagcggggcggaagcgtcgtcacattcgtccgttacggcgataaagtggcggaaccgatcgtggaagaagggacggccgatatcgtcattgcctttgaacggctggaagcttaccggtatgcacattttctgaaaaaagacggagccttgatcgtgaacgactggaggatcgaccccatgccggtcgttatcggggcagccgagtatccggataatatattggaagaacttagaaaagagtacaaggtatacagtgtcaatgccacagaagagtccagaaagctcggcaattccagagtgttcaacatgatcgtgctcggagttgccgccagacatatggatttcacgaaagagcagtggtacgaagtgatagaaaaaacggtgccgccgaaaacggttgacataaataagcaggcgtttgatgtgggctatgatctggaatccagataagtccggggtgtacctgattaaatttaaggaggtgtggtatgatcaggcaattatcagtattcgtggagaacaagccgggaagtcttatggatgttacgtcacgtctcacagaggcgcatatcaatatccgggctgtcgcgtcttttgacacaccagagtttggtatccttcgtctcgtagtcgataagccagcagaggcgaagggatgtttgactgaaaagggattcgtcgtcagactccatgacgtgatcggtgcggagctggaggataaaaaaggcaatctcaatcagatgttggcaatacttgcagaaggcagaataaatgtaaactacatctattcatttgtgatccgcgaaggaaaagcgccggttctggtattcagcacggatgactatgagagagcagctcagattcttaaggatgcaggtgtaaagattgtagaggaatcagatttataagattaagaataggagtagattgacatggcaggagtagcattaaaagactggaaagaacaaatcagagacccgaagacagagtgtatgggcagggatgagatgacagctcttcagagtgaacgtctcgtgaagcaggttaagaacgtatatgagaatgtagagttctaccggaaaaagatggatgatctgggcgtggagcccggggatatcaaaggaattgaggatatcggaaagcttccgttcacgaccaaagaggatctgagagacaactatccgttcggactgctggcagtccctcaggagaagatcgcgagagtacaggggacgtccggaacgaccggaaaactcaccctcgcttcctatacgcagaatgacgtagacgtatggggggaatgtgttgcaagaggacttaccatggccgggcttacggcggccgaccgccttcacgtatgttacggatacggcctgttcacgggaggcatgggcctggatctcggagcaaaagcgctcggagccatggcgataccgatgtcatccggcaatacgaaacgccagctcatgtgcatggaagacttcggggccacggcgttcgcctgcacgccgtcctatgcgctctatctggcagaggccgcagaggaagcaggcatcgtagaccgtctgcagatcaaggcgagcatcaatggagcggaaccgtggacagatgagatgcgtaagaagatcgagagtattctgcatattaacagctttgatatctatggactgtgtgagatcacggggcctggcgttgccatggactgtatccaccacaaaggcctgcacgtatatgaggattatttctatcctgagatcctgaatccgggagacaatacttcatgtgcggacggtgagacgggtgagcttgtcttcacgacgctggccaaagaaggcatgccgctgatccgttacaggacgaaagacctgacaagcattgaatacagtacttgcgagtgtggaagaacactcccgaggatccagaagttcaccggacgtacggacgatatgaaagtgatccgcggagtcaatgtattcccgacacaggtagagacagcgcttctttccataggaggcggtgtggcgccacattaccttatgatcgtggagcgcgagaacaatctggatgtcctgactgtcatggtggaggttgacgagagatacttctccgatgagatccgtaagctggatgagctgaagaataaagtcggtgccgcactcaagcaggcgctcggcgtatctgccagggtaaaactggtagagcctaagacgatagagcgcagcgaaggcaaagcaaagcgtgtcatcgacaagagagacttgtaagaaggaggggaagtaagatgggtatgagtaatacagtacagcagttatcagtatttttggagaacagagagggccgtcttgacgaggtacttgccatacttgcggaaggcggagtgaatatagtggctttgagcctggcagatacatctgattacgggatgctccgcatgatcgtgtcagatccccacaaaggaagagccgtgctgaagcaggcggaaatcacggcgatgctcacagatgtggtcgcgctgcgcgttcctcacgccacgggctctctgagcaaagcgatgcaccagatagtggaaggtgaagtgaatattgagtatatgtatgcgtttgccaacggaagtgacgcggcggcagtgttaaagagcgatgatcccgcgagagtgatcgatatcttgaagggcagcgggtttgatgtctacagcgcggatgaggcatacagggcgaatatgtagcagcacaaaaaagggggatgtcatgatcgacatcccctttttcttaatctcatttcatgtattactttttaatatctaaatcaatctttcaagtcttgtttatatataaaaaaggtacatccaaattctgattaatgcaattgactaaactcttgttacgttaacagcctgaggacctttagagccttcagttacttcgaactctacttcctgtccttcttccagagacttgaagccgtccatgttcaggccggagtagtgtacgaatacatcgttgccagtctcatctgagatgaaaccataacctttttggttgttgaaccattttactgtacctctgttcattgtgttacctccataaaaaataaaaataaataattagataccgtataaactataaaatgaatctatagattatacttcgtcagattagcataattttataaaaaagtcaatgcattcgacaatcttttttacaatattactaaaataaccggaattattttgtgaaatacggaatcaccaaattgtattgacaaaaagagatgtcaatgctaatatttaatcaatataaaaaagaagtggctattgaccggtcaattttttttagccttactgatattatcagagataatattacagttattatcaaagataataacatcatcacactgagacagttactgttgcaaaataaggaggaagggatatgtcatacagattagcagccgacgtcgggggaacctttacggatgtcgtaatggtcgacgatgagacaggcatcctgaagaccacgaaggtgctgacaacaccgcaggcattggaagcagggatgcttaagggatttgacgaacttacatccgggaagtatgaggagatcaccagtatcgtacacggtacgacatccgggttaaattctgtgattgagagaagaggcgcgcattgtgcactcataacgacaaaaggcttccgggatgtctatgagatcgcaagggcaaaccgtccggaaatctataataaccattatcgaaaacccgagccgctgatcccgcgcagagatatctatgagatcgaagaacggactacttatgccggcgaggtggaaaaagaggttacatatgagacggtgaaagaactgatcccccggctggaggggcagtatgaagcgatcgcggtatgccttataaacagttatatcaacacggagaatgagcagaaagtatgccggatcctgaaggaaaacctgaacggggaggtgatcgtcaccgcatcccatgaaattgcgcgggagtcccgggaatatgagagagtcagcacggcggtgctgaatgcgtatgttgccccgagcacgaggcatcatgtgcatgcgctcaccgaagagctgagaaagagaggattcaaaggcacgctttatatgatgcagtcgagcggaggcgtgatacgggctgagatggcggcaatcagggcggtacagacgctgatgtccggtccggtaggcggggccatcggcgccggcgccatcaggagggaaaatatcattgggtttgatataggaggaacgagcttcgatgtcagcctcgttgtaaatggcaagatcgaaacagcagtggaagcggagatggagggctttccgattctggcgccgactgtaaatgtattcagcatcggcgcaggcggcggcagcatcgcgtgggaggaagccggcggcatgcgggtaggtccccagagcgcgggagcagcgcccggaccggtctgttatgacaaaggcggaacagaacctacgataacagatgccgatctggtgctgggacatctgtctcccggacattttctcggcggacggatgaaaataaacgaggaaaagacgaaggagatctttgcagcctacggagaaaaatttgggctggatacggtcacggcaggagaaggcgtgtgcacgatcgcgaaccacaagatggcagacgccataagagagcttacggtccgcaggggcatagatccccggaagttctccatcctggcatttggaggcgcagggccgatgcatgcggcgctcatcgccggggaactggacataaaagaagtcattgtcccggccaatcccggtgtgttttccgcatggggaatgctgcaggctgatatccggcacgatgcggcggtcaccagcctctgcctgctgaacagacttaaggaggaagaatttgaacaaaactttgaatgtctgaaagaggagctgcaggaagtgttagaaaaggaagggatcgggcggcggaaaaagcagtatatctgttccctggatatgagatatttcgggcaggaatacaccatatctgtagacataccggaaggcagaggctgctgcagagatgatattgaggagcagttcaaccgcatttatgagcggctgtacgggcaccattcgccggacgatatgatcgaggtagtgaattaccggatgacagttatcgtgccggtcaagaagtctccggcagcaggaagggccggcgaaggaagtgcagacatcatcgaccggctgccgggatattttgacggtgtgcggtatgacatgaacgtatatgcgagagaacagcttgtggcgggaagccggatcgaaggcccggccattattgcggaactgacatccacgaccgtagttccgccgaagtggaaactgacggtagatgaggcggacagcatgatcatcacaagagtgtaaggaggagataagatgggagcaaaagtaagtccgatcgtcgtagagatcatacgtaacgcagtaaattccgccgcgcgggagatgaacagctgtctgatcaagagcgctttcggtccgggaatttatgagatgaaggactgcagtgtagggatattcaaccgggatgccaggcttctggggcaatcttccggactgccgatctttctcggcaatctggagatatgcatcaatatcgtgacagagcggatcggtgtgtacggctaccgggaaggagatgtattcgtcatgaatgagccgtatctgcaggggacccacgtggcggatgtcaccgtgctggcgccgatcttctacagaggggaacttcacggcttcacggcagtgcgggcggccatgcaggacatgggaggaaaagatccgatcggaaacgcggattcgacagacgtatatcaggaggggctgcggattccgccggtccggctctgttccgaaggaaaagtgtgtgaggatgtaatggagatcatcgccatcaacagccgttatcacacgatgatgaagggggatctgaacgcctgcatcgcggcctgccatacgggcaggacccgcatgaacgaactttatgagcgttacggtacgaacgtgatggaagaagcggcaaaggaaatcttccggcagtcggaagaactggaccggaaagcagtagcggacataccggacggtgtatatgaggcggagggatatctggataacgatggcctgacggacgagcctcgcaggctcaaggtaaagatatgcatacagggggaggtgatgaagatcgatctgagcggaagctcccggatgggcagcggtccgatcaactgcggaagagcgcagaccattgcggcgtgcagggtcggttataagcagatcatcaatccggagagccaggtgtcaggaggcacattccagaatctggaggttgtggtggaaaaaggaaccttcctggcggcggaagaaccggcgccgtgcggatggtattttacgggactgggccttttgatcgacctgatcggaaaagcactgtcaccggttatggaaaaagaggcggccgccgctcattacggagattccagtctgatcatcttccgcggctatgactcggcgcggaataaaacgttcggtatctgtgaagccacttcaggcggctggggtgcatttgcggacggagacggccaggactgcatgatcaatgttgtgaatggagatttgaaaaactggagtgttgaatttattgaagacaagtttccgctccggctcctctcctatgaaatacggaccgactctcaggggccgggaaaatggcgcgggggagcgggcgttatccgtacgtaccgcgtggagacagaaggagagtgccggctgatgctctggatcgaacggacgaagacgacggcctgggggctgttcggaggaggaagcggtcaggcgcccgctgcggtcgtgaatccgggaacgccggatgagcgcgtgtacctgaagacaaatgctctctctctgaagaagggggatatcgtacagataaggaccggaggcggcggagggtacggagatcctcttgaaagagacagaaaagcggtgcgggaagatatagagaacggatacataacagcagaacacgcagaaaaatattatggctatgaggcatagccggaagcaaaggaggaaaaaggatgaagaggaatgttatgagaagagttctggtactggctatggcggctgtacttacatgttcactctgtgcctgcggcggagataagaaaagatccggcaaagaaggcaaagcggatacgaatgatgataagacatttgtcgctgccctggcattcatgccggacagcatagaccctaccaatcttatgaacgcggcagatatgcacgctacacggaactgttatgaacctctcgtggaagaagtccgcggaacaactgatctggaaccgtggctcgctgaaaaatgggatataccggacgcgaagacttacatattccatatccgagacggcgtgaagttctatgacggcacggacctgaacgcggaggctgtcgtgtattcttttgagcgggcgagggcatttgtcaattcggtctcatcctgcgtggaggagatcgacacgatcgaggcggtggatgacatgacggtaaagatgacgctgaaggcggaaaattcaggatttctttataacgtggccaagataggtattatctcccctgcattctgtaaggaaaacgaggaggacggagactgggcccagaagtacctgaagaaacattcctgcggaacgggggcatatcaggtgacagattacgtggacgaccagtatgtgacgttatccagatttgacgattactggcagggatggaaagatgatcagatcgacgtggttcagacattgatcgtgaaggacaatgcgacccagatccagatgctgaattccggggaagtggacaaactgcagataccgctgacggagaatctggatatgctggaaaaaaatccggatatcgatatcttgaagggagggtccctgcagacgaatatttttacgttcaacatgaagaaggcgccttttgacgatccgaaggtaagacaggctgtatcctgtgcttttgactatgaaggggtcaaaaatacggtgtacaacggacaggctactgtgccaagcggattcatgccggctgattttgcggaacatgacccggatctgccggagcagaaacaggatatggaaagggcaaagcagctcatggaagaatccggagccggagcatgtgagatccgggtacatctgtgcgaaggcagtgatgaccaggtacagatggcgcagatcctccaggctgatctggcggagatcggaattacggtaaaaattgagattatgccgtggacgtctctcgtagaggaaaatacttcgccggagacagcgcctgagatgtcggcgctcaatatgggcgcgttcacaggagacgcggcctttttcctgaaacagaattttcacagtatcaacagcggcggctcttataactggagcttctatgaaaaaccggagtttgacaaactgctggatgacgccgcggccactgtggacgagggagaaaagacaaaactcctgaagcaggcgcagcagatgcttgtggacgactgcccggcggtatttgcggcatccccgaatacggtggaagcgatcaataacacgtacagaggatatgttctgcatccgctcgattatttctattccatccggttctatcagctgactgtaggtgaataggggacaaaaacggagggaagcgttatggcgaaatttttgttaaaaagatttgcatcgcttgtgctggtcatcatcggtgtcacaatgctcgtgttcctggcgacgtattatctgccgtcagacccggcgagggcggctgcggggccgtccgcaacaaatgagcaggtagaggcaaagcgggtagagctgggcctcgacaagccgatatatgtccagtatatgaagtatatgaaagggcttctgaggctcgatatgggaacctcttttaagacaaagcagccggttgcgcaggagatctcttccaggctttccgctacgctcgaactgacggcagtatcactcatagtattttttgttctggcgctgattttgggaagtgtggcggctttaaagcgcggcggtatactggacggcatgatccggtttttctcggtggccggcatggcggttccgccttactggctggcgctcatattccagtatgtgttctactacagacttcagtggctgccggccggttaccggctgccggtggggacgatgcccccggaacctgtcacagggttctatctgctggacagtgcgtttgcaggtgactgggcattgttactgcaggcagccagacatctgcttctgcctgtgttaagcctcgtactcggctattgcgggatcacgaccagaatgatgcggacacagctgctgcaggaactgcggcaggactacataaggaccgcgaggtccaaaggacttccggaacattcagttatcagacgccatgcgatgaaaaatgcaatctcccctatactgacactgcttggtatgcaggcgggcggtatgatcggcggtacagtgctcatagagaagatattcagctggcccggacttggctcgtatgctctggatgccatcgcgtcgctggacttgatggtcgtggccggtattacgctgacgatggcagtcatattcatactgatcaatctgttcgttgacatttcttatgtattgatcgatccaagagtgaggttaagctgatgaaaaaaatcaagaattatttttttagagatacgccgtccgtcatcggtacgctgatatcggtggtgatcatactgttcatgctcacagggcctttcatagccaggtataagccgcttgtcgtggatacgggcgccaagctggtggcgccgggaagcattcactggttcggaacggatgagatgggacgggacctgttcagcaggatggcatatggttcctggtactctatgggaactgctcttgcggttgtgctgtgcgcggcggcggctggtatcatgatcggcgggatcgccggctatatcggcggctggttcgacaatctggtaatgcgtatttgtgatgtgttcatgtcttttccgcagatatttctggcaatgatcattgcggcggcgatcggcgcggggatcgggccgaccatctttgcgctggcagtgtcctggtggccgaattatgccaggatggtacgcgggatggtgatcgtcataaaggaaaagctatatgtggaatcagcgaaggcgatcggaatgcatccggcaaagatcgtatttaccattatcatcccccagacgatgtccatggtgatcccccagatcacaatggggatcggcaatgcgttgatcgcggcgtccggattctcctttatcggacttggggcacagatgcctacaccggagtggggagcgatgatatcggccggaagcctgttcatatttaacgcgccatggtactctatgatacccggcgtatttatcttcctgtcggttctcggattcagcctgttaggtgattccctgcaggaggcaacgaatccggaactgaggaatctgtagaaaagggaggatatatgatggatataaagaagaggatagaagacgcccgcactgtcatgaggcaaaaacagctggactgtctgatcctgtctccgtcagcagatctgtattatatgaccggacttagcccaattgctgcagaacggcctgttttccttatcgtgcttaaggaggaggcatatgttatcctgcctgcatttgaggcggatgatctgcgggaagaggtaaaggaacagatctcctgcattttctggcaggaaacagaggatccgtacagaaaggccgcggcgtgcgtcggaggtggaagtatccgtatcgcggcgggggatgcgatgccgaacgtgatggcctaccggctggcgcggcagataaaggcggcgtcctggtctcttggcagcgaggtgatggaggaactcagagccagaaaagacgctgcggaattgaaatacttaatgactgcccaggagaaatcagaagctgcgctgctcaggacattggaacagggactggaaggatttaccgaacgggaggtggcgcagcggctgaaagggtatctggaggaagaaggactctcatgccgggggctgccgctcgtggcggccgggcagaacggggcggtgccccatcaccaggcggcggactgccggatctgctttcaggatgcagtcgtcatagactttggaggaagctatgaaggatatttttcagatattacgagaacggtagcggttggaaaaccgccggaaggatttgaagaaatatacgggacggtgcgggctgccaatgaggccgcgtttcaggcggcagcgccgggcatcacatgcgggtgtctggacgaggcggcccggcaggtgatccgggaagccggatacggtggattttttacccaccgccttggacacggcatcggcctggacatccatgagccgccctatatcgttgcgggaagccggaaacagatagagccgggcaatgtcttttccaatgagccgggcatctatcttccgggacgctttggtatccggctggaagacgatctgtacatcgggcagaaagaagcagagtgtctgaccggacttgggcatgagctgctcgttgtggattagaggggagggacatacagtgggcgtagcattactgaatgtggatggtctcgtaacagaattctacggggaaggcagaacggtcagggcgatcgaccatgtgtctttccatgtggataaaggagagattctgggcgtcatcggggaatccgggtgcggcaagagtgtaacgagcatgtctgtcatgcgtctcattccggagaacctcggcagagtggcggaaggaacgatcacctttgaggacagaaatatactgaaaatgagccggaaagagttttcaggtattacaggaaaagagatatccatgatttttcaggaacctctttcctcgctcaatccgctgttgacatgcggatatcagatcgtggaggcgatccgctgccatgaggcggtaagcagaaagaaggcgtggaagaaggcggtggggcttcttgacatggtcgggatacccatgccggagaaaagagcggaggaatatccgcatcagctgtccggaggaatgcgccagagggtcatgatcgctatggcgatcgcctgcagtccaaagctgctgatcgccgatgagccgacaacggcgctggatgtgaccatacaggcgcagatactcgatatcatcaggaggctcagagaggaactggggatggctgtcatgtttattacgcatgatatgggggtgatcgcggaagtggcggaccgggtgatggtcatgtatgcggggagcattgtggaggaagcgcctgtcaaacaattcttcgccaatccgctgcatccttattcgatgggacttttaaaggcggtcccaaggccggatgaaaagaaggagcgtctgtttatgatagaaggcacggtcccgaaactgtcggaggagatcattgggtgcaggttctgcggcaggtgcggctgtgcagcggatatctgtacagaacaaaagcctccgcttgtagacgccgggcagggacagaaagtattatgctggcagtatgccatggaaggcaggtgatgcggatgacagttcaaaagaacgggcaggaaaacgctcctttgctgaaagtgaatcatgtatcaaagtattactctgctaaggcaggggcgttttcaagggacaaaagagtagtcaaagcggtggaagatatcagttttgatgtgtatccgggagagacgttaggtatcgtcggagaatccggctgcggcaagactacgctgggaaaactggtgctccatctgtttgaaccgacaaagggcgaggtcctgttcgggggacaggatgtgctgagattaaaagggcggcagctgcgggagtttagaaagcatgcccagatcgtatatcaggacccatatacatcgcttaatccgagaaacaccatcgggaggacgatcgccgagcctctgctcgtccagaagcttgcggataagaaacagacagaggaaagcgtactgcgcatgctggaggtggtcggactgtcctccgattactatgacaggtatccgtttgaatgttcaggaggacagcggcagcgggtgggaatcgcccgggcgctcatcctgaatccaaagctgatcgtctgtgacgaagcggtatcggcactggatgtgtccacgcagtctcagatcatcaatctgctggatgatattcagaaggaatttaatctgacttacctgtttatctctcacgggctgtccgtggtacgtcatatgtgcagccgtgtgatggtcatgtatctcgggagagtggtggagatcgcaggatgcgaggaactgtaccgtcatccgcggcatccttatacagaggcgttattctccgcgatcccactgccggacccggagatcaaaaaggatagaattatactggagggagatgtgccgaatccggtaaatgtaccgtcaggctgcgcatttcatacccggtgtaaatatgcgcacgagcggtgcagaaatgagacgccgcagatgcgggagacgggaaacggacacagcgttgcgtgtcaccaaataaaatgatcaaggaggaaatgaactatgtcagaagaaagaatgggaagggaacgggaaacagagatcaaccggaatgcgatcggccacagagcggcatggatgggactcatttacgatgaagcagttaaggcgggcatagatatcgaggaagtaatgagaagagccatcgcaaggagaggagagcaggacggaaagaagttccgcgccaaatgtgaagatattacagaccttgccagtttccggaaggtgttcctggatgaacttggcatgaacacctttgatatggaagtagaggaatgctctgcgcaggatctgaagatccagttccaccactgcccgctgctggccgcctggaaagacctgggcatggacgatgcgcaatgtgcgaaactgtgtgatattgccatggacggcgaccgcagtattgcgggagcgatggggcttaagttcgatctgaacggggcgatcgcggatggatgcgccacatgcagcctgcactttcataagtaatatacagcctgtgcgcttcgtattgaagggtatccaatagaagaaatttctggtagaatgatacataggcgaaacgcagtgtaaggcggaattttgcgaaatcaggaggacagtaatgtcaggtaatataaagctaaaggaccaaatctatgaaaatatcttgaatgagatcattgatggaaactacaggcagaatgacatcatcacggaacgggaactgatcgagaaatatggggtcagcaagtctccggtacgcgaggcgctcgtggaactgtgcaacgaaaagatcctggagagccgtccgaggatgggataccagatatgtccgatttcgatcaaggagatttccgatattgtggaactgcgcattatcctggagacggccgcgttggagaaaacatttgcccggcttaaggacgggcagatcgaactgctgaaaaaggacgttacagaggcgacaaagctccacagcgaaaaaaagatagcgaggtattggaagagcaatatcagctttcacctgcttctgtgcagtttctgcgggaatgagaaaatctgtgaggcggtggagcgggcgctgaagttttcttccagaagcgcggtacagtattacttttcttccagtgtacacagaaatgagactacggcacagcggcatatactgctcatagaagccctggaaaagaggaatcttgaggaagcaaaagaagtgttgaaagatgacatcatggatctgaagagggagattgtggaggggatcatagcataaggctgcggataaaaaagcatcaacttttttcttgctcaatcatctattccagtttgcactttggtgtgctatactatccttagctgtcaaataggatacggcagggcaccggcagttctcccacgggcacacacttttcccggcggggggcggctgaacaaaacagtctgatccgttctgacgaaggaggaatctacatgaaaaaaacaaggaaaagcatactggctttgctgctggcggtgatgatgctgttctcgttcatgccggctacggtatttgccgctggcgtggacgactcgcccgcgctcaccgtcacactgacagaagcatccgaaggggccccttcggatgtcgggggcggagcccccgacataataacctctgaacagcaggcgggcggccttgccgctcccatcgtgacggcgccgctgagtgagcggattgccacggatgcaaaggtgtctgcccaggtggataactgggcgggtttggagaacgaggtgaaaaacggcagcgccacggacatcgaaatcaccggcccgatgacggccaccagcatcatcatggtgagccgcagcgtcaccatccactcggacgaaaacggcccttacaccattacccgcgacggcgcgtttaagggcagcctgttccatgtggacacggtaaacggcgatctgactctgcaagacgtggtgctggagggcggtgtcaccgttccggccagtttggtgctcgtggaaaacggcggcaccttcgagctgcgcagcgggacgacgctgaaaaacaacgaatcttccggcaacggcggaggggtgtgcgtaacgggcaacggcaccatctttaacatgacgggcggcagcatcctcggcaactggggcgaaaacggcggcggtgtgtatgtagcggacggcgccatcttcaacatgagcggcacggcccaaataggcggcgccggcaccaacgagggcaacacggccatcaacagcggcggcgtgcatgtgacgggcatcggcaccatcttcgccatgacgggtggcagaatcctcgggaatacgagcagcaatgccagcggcggggtgtccgtattggacggcgcctccttcgagatggggggcacggcccaaataggcggcgccggcaccaacgagggtaacacggcctactacagcggcggcggtgtggatgtgacgggcatcggcaccaccttcttcatgacggatggcagtatcaccggcaacaaggtggaggacttctccgggggcggcggtgtgtatgtgtcagacggcgcctccttcgagatgagcggcacggcccgaataggcggcaccggcaccggcgagggcaacagggctatcgtcggcggcggtgtgcgtgtgatgaacggcgctaccttcaacatggcaggcggcagcatcctcggcaatacggtcagtggcaatggcggcggtgtgtgtctgtcggacggcggcgccatcttcagcatgacgggcggcagtatcctcggcaacacagccagtggcaatggccgtggcgtgtctgtgatcagagatagcgccttcaacatgcagggcggcctgatcaccgcgcagggcggggataccgtcaatgtgtggtccggcggcgccgcccttacggtgtccggcggcgcggtgatgcagacagacgcgaacggtactgccatctatggtcgcgaaatcagcgcggatcaggtgaaaatagcggacaagggcacggtgtacagcagaggaaaggccgtggcgtatgaggccaccggcctcactttccctggtcccatcggcgacgggctggtgattttgcagaagggcgacagtgccccctatgaggccggcgccgatacagaccttaggcccacccccaccgacgccatggtacaatgggacttggagggcggcatcggcggcatccgctacgaaaaaggcggcaacaaaggctttttgccgctggatgtaaaggtgcagtcagttagcccgctgccaagcaccacctataccgtcacctttatcagcgacagcgcgatatttaaggaagtgccgggcatcaaacagggcagcgcagtgggcagcgggtggcccgacggccctgtcaagagcggacatacctttgacggctggttcacggaacaaaacggaacgggcacccaatatacgaatacgacgcccatcaacggcgatgtgacactgtacgccaagtggacgccggacggcgtgccccataccgtgaatattgccatcaatgcctccatcatcccgcagaccggcgatacggcaaatccgctgtcctgtctgctgctgatgctggcggctctggccggctgcgtctccctgctgctctatcggaattgccgttgcaaaaagcgtcatgggtaagcgcggaaagcatcctcggacaaagcaggaatcccatcggaaaagccctctgtggctgggcgttctgctcttactggccggctgtgctttgtttctctaaacggatggtaaggagcgaatgcgcatagagtataaattcctgccatagcgaatattttagaaaagccgccgcggtttgtaaaccgcggcggttttgtagatattgccccgtctgcgctgccagagctcgcttggatttcaggagatgatgaagcatgtggagaactacggcgtgtccgccttgatcgtcaaggatctgtaccggctgggccggcaggatttacatggaccatgcagtgtttgactttggtaaacttacgttccaccgcgtcatgaacacgctcggcgatatcgtgggcctgcgaaagtgacagatcagcgtcggccacgatctccaattctacgtaatatttgtctccgaagatacgagtgttcaggcggtcgatgttcaatacctgtttgtcggagagcacggtatcgcgcagcgcctgtatggtcgcatcatcgcaggagcggtccgtcatcttggagacagcgtctctgaaaatatccaccgccgccttgatgataaagacacagatcaccacgctggcggcagggtccagaatgggcatgcccatacgggcgcccaatattcccacgaaactgccgacagaagaaagtgcgtcggaacgatggtgccatgcatcggccataagtgcaccggagcctgttttctttgcggcagcgcgggtataccaatacatcgcctccttcacggcgatagagacgatagcagccgcaagcgccagcccgccgggcgctgccagcgcagaaccgcccgcccggatctttccgattccggacgagccgatgcccagtccggtaagtcctagaataacggacagaatgatcgccgccacacattccaaccgttcgtggccgtacgggtggtccttgtcggatgccttgtttgcaagtttgactcccgctattacgacaaaagtggtcatcacgtcggatgccgagtggacggcgtccgagaccatagcccccgaatgtgcaagcagtccggctgccagtttgaggatgctcaatacaatattctggacaatagtgatcagagacacacgcattgccatttgttcgttggtacattgttccataattgttacctccagtatttgagatagctctatggcactccattccagcgcgtatgttccgggcagaggacaaaaaaatacacccgcggaacacacatactgtcccgcggatgccatgcatccgctgccgaaaacggcccggccccacggacctgatcacacaagatccatcgcctgctcagtttgtaccgctatgatccccgccctgaaaggggcagtgcagtgcaaagagatgtttatattttagcgtatgcaaagcaggttgtcaaagttcttttatattaaatagtccggggggatgagaattgtgattttcgttgtgtggatctgcggatatatgatatagttggcatataaccggactttcctgcggccttcacaggcaggatccaaataatgagcactttcagagaaaggagtgcgtatgaagatatcgacgaagggaatatatgcgcttgaagtggtggcagatctggcgcttcactcggatgcggcgcatctggagagccttaaaaatatagcagagaggagaaagctctcggaaaaatatctggaacggatagtgaaagcgttgaaagatgcgcacattatcaagagcgtgcggggagcatatggcggatactgcatggcaaaggaaccgcagcaacttaccgtgagagaggtgctgaaagcggtggagggagaactggctccggtagactgcctgacgcaggagagcagctgcggcatagactgcaggtcctgcccgacaagagatacgtgggccgcgctgtggcagacgatagccggcgttgcggatgaagtcaccgtaggagatattgtgcgcgcggcggaaaagatagataagggattgtaattatcccgattgcgcaatatactatatttgtgtttcgttgccctcatcatagaatgaaatgatataacaaggagaattataattatgattcgagcagatatgatcgcggctattggcagaaaatatcttaccagcaatattgaaaatgatgaatatagttacccgaaagctttttccgacgcttcactgaccttttgtccgatacaaaacagtgccgggaggaaatttgaaagattagatattcgctttgttaaggataatatatctgtattggttgaaacaaaacagaactttacaaaagcggatgaagaacagctttccgcttatgttgaatatgaaaaagcactcacaggtaataaaatcgttgcgattcttgcaaatacgaagaatgataatgtgaaagtgtggcgcggagtgatctctgacggtgattttatgccgaaagaaacagcgctgcgcacgatgcgggaatatgttgatttttacacgtcgaaaattaacgataaagaaaaggtgatgcagaatacatataagctcaatgagttgctgcaccgccacagcattcctgaaaagctgcgcagccaatttgtcggcacctgccttctggctttgaagaacgatctggattattcaacgccaactatcactgccgctcagatcagggcacgcatcaaggaagtgctcgaagaacttttgaattcagacataaataaggcagagaagcttgctttgctcaataggaatgtcctgaacggccagtatgtgcgccagctgaatattgcagcatttagagagattttgaagttcattgaagataatatacttccctttatcaatgataagagtacatccggacaggatctgcttaatctgttctttgtcacatttaataagtatgtcggaaaatcagataaaaatcaggcttttacgccggatcatattacggactttatggcaaagatcacaggcgtaaataagcattcggtagtgcttgacccctgttgcgggagcggatcttttttggtgcgcgccatgacgcaggcgcttgatgactgtgccaccgcagcagaacaggaaaccataaaaaggaatcaaatatacggcattgaatttgacgagaatgtttatggacttgcgactaccaacatgctgatccattctgacggcaactcaaatatacgtcagggaagctgctttaaactttccgattggatcaaagaggccaaaccgaatgttatattgatgaacccgccgtataatgggcagaggatccacctgcctgaacactacgttaagacgtggacgaaaaacaaaaaagaggatccgtcaaaaggtctttacttcgtaaaatatattgccgatacacttaattccatcaaccagcaggctaaattggccgtattgcttcctgtcgcctgcgccattggcacaagcggtgagatcgcccgtttgaagagtgaaatacttaaagagaacacgctcgatgctgttttcaccctgccaaatgaaatattttatcccggggcaagcgcctccgcctgttgtatggtgtttaaaattgggacaaaacataaagatatgacaaatcctgatacatactttggatattgcaaagaagatggatttaaaaagaaaaaaaatcttggacgtgtagagcaggttgacactgctacaggaaaaagcagatgggtagaaattgaaaaagaatggatagaattatatagaaaccggcagtctgtagatggcttttccgctacacataaagtggacggaaatgacgagtggctctgtgaggcatatatgaaaacagattatacgaaactgacggagcaggattttcagcagactatcaatgactatctggcatatctggttaaagaaggggttatgtatgaaccttgatcataaaaaatggaaggaatttgtatttgacgatatattttatatagaacgcggcagttcattatatattacggattgtgagaatggaagcactccgtatgccagtgcttctgctgataataacggcatttctcattacctggccgtcccgccaaacagaacgggaaactgtatcgtggtgaactatgatggaagtgtcggcgaggcattctatcaggcggaaccattttttgcaagtgaaaagattgtgaccattactcttaaagatacagaattgaatgtctatatcgccttgtttttagtaaccataataaaacaggagaagtttcggttctcttatggaagaaagtgggcagttaattctgttatgcgaagatcctgcattaaacttccggcaggaccggatgatctaccggattgggactttatggaacggtatattaagtcactgcattataagccgttgtccagttctaaccggaaagataaatcaaatgcgcttgatattagttcgtggaaagaatttgctgtgaatgagttatttgaagtcagatacgggatcaatatggaactgaatacctgcatacctgcagataaaaatgatcctgattcagtaaattttgttgcccgcactgaagcaaataacggtatcagtgcaagggtcagactggtggaaggcaaaacgccgcagccggccggcttgatcacttgtgccggcggaggaagcgtcctctcaacattcctgcaggaagaaccgttttacagcgggcgggatctatatctgctggtcccgctgcagccgatgagtaaattagttaaattattctgtatcaccgtacttaaagctaataaatatagatacagctatggcagacaggcgaatgtgactctgccatatttgaagctcatgcttccggcagcctcagacggaaagccggactttgcgtttatggaaaactatatgaaacaactgccgtatggtgataaaatattcggatgacaggaagtgcctgctgaagcgggcactttttcttatgttcatttaaatttaaaaagtatattgacatggtaggaaaaaaggtgtataacttaaaacatataattcttatcggaatagtaggaattagacggaggtacagatcatgaagatatcaaccaaaggaaggtacggactcagggcgctcgtggatatggcggcgaattccggcgaagaggccgtatcacttacgctgatcgcaaagcgccagaatctgtcgctgaattacctggaacaggtattcggcatactcagaaaagccggcatcgtggccagcgtaaagggcgccgggggaggttaccggctggccaaagatgccgcaggcataacggtgaaagagatactggaggcgctggaaggcgagttttctattgccggcacggcaaagggagagacggaggacgcagttgggcaggcgatccgtacactcgtctgggatgagatcgacaggcgggtgaatgaactgctgaaggaaaaaacacttgccggactcgccaaagagtatcggataaaacaggagcagtcggttcatatgtattatctatgagataaatcagatcaatggaaaatctggaaaaaagaaagagaggacatgaggatgagcagaaaaagaagatttgagacgttacagctgcacgcaggacaggaacagccggatccggcaagtgatgcgagggcggtacagatctaccagacgacatcatatgtattcagagactgtcagcatgctgcggaccgtttttctcttgcagatgcaggaaatatctacggcaggcttacaaactcgacacaggatgtgtttgaaaagcgcatggcggcgctggagggaggtgtggcagcgctcggcgtagcttcaggcgcggcggcgataacgtacacattccagaatctggcgcaggccggcggccatattgtggccagcaaatacatatacggcggaagctataatcttctggagcatacgcttccttcccaggggatcaccacaacgtttatcgaccccgatgaggagggggcgtgggaagcggccatacaggataatacgaaagcgctgtttctcgagtccatcggcaacccgaatgcgaatctggcggatatcgggaaagcggctgaggcggcccacaggcacggcatcgtgctggtgatggacagcacgtttgcaacaccgtatctgctgcgtccgtttgaatacggcgcggacatcgtcgtacattccgccacaaagtttatcggaggacatgggacggccatcggcggtgttatcatagatgggggcggttttgactggaaggcatcgggcagatatccgcagctcactgaaccggacaacagctaccacggcgttgtatttaccgaggcggcgggaaaagcggcgtttgtgacaagaatccgggcggtcatattgagagacaccggggcgacgatggcgccgcttcacgcgtttctgtttctgcagggactggagacgctttcgctgagggtagaacgccatgtgcagaatacgctgaaagtggtggagtatttgagcagtcatccgaaagtggagcgggtgaatcatccgtcgctgccggacagtccgtatcatgaactgtataaaaagtatttcccggacggcggatgttctatctttacatttgaagtgaagggaagcggggaggaggcgaagcggtttatcgacagacttgagatattttccctgcttgcaaatgtggctgatgttaagtcgcttgtcatacatccggccagtacgacgcattcacagatgacggaggaggaattggagaattcgggcatacggcagaacagtgtacggctgtccatagggacagagcatattgatgatatcatatatgatctggagcaggcattgaacgcaatataactcatactatattaaagaatagaaaaggagaccggcgatgggacatatttataagaaagttgaagaaatgataggaagaacaccgcttctggaggtgaaacggatcgaagaggaaaaaggactgaaagcgagagtgcttgtgaaactggagctgtttaatccggcgggaagcgtaaaggaccgggccgcgctgtccatgctgctcgacgcggaggagagaggactgatcgcccctggggcgacgatcatcgaaccgaccagcggaaacaccgggatcgggctggcggcagtagccgcgtcgagaggctaccggacgatctttaccatgcctgagacgatgagcattgagcgcagaaagcttctgaagggatacggggctgagatcgttctgaccgaaggggcaaaaggaatgccaggagccattgcaaaggcggaggaactggcaaaggagacggaacatgcgatcgtgctcggacagtttgttaataaggcgaacgcgaaggcgcatatggagacgaccggaccggagatatgggaagacacggacggagaggtggacatctttgtcgcaggtgtcggaaccggcggaacagttaccggaacggggacgtatctaaaggaaaagaatccggacatcaggatcgttgccgttgaacctgcggcgtctcctgtgctttcaggcggaaagccggggccccacggcctgcagggcataggcgcgggatttgttccggatattcttgacacaggcatttacgatgagatctttacggtggaaaatgaggaggcctacagcgcatccagacttctggcggcaaagcagggagtgctcaccggcatctcgtcgggcgcggcgctccacgctgcggtcgagcttgcgaaaagagaggaaaataaaggaaaaaccattgtggcgctgcttcctgacacaggagagagatatctgtcaactccgctgtttgagtaaaatattagttcttgacggaagctgctttagcgtgtaaagttatgttattaaacagaagaagcagtaaaggatagaggtactatgattacactgacagggaagaaagtttcggagggcgtcgcaatagggcggctgtcattttacaggcgggatacaaaagagatcaagaagtttgacgtcaaagacgttgaaaaggaaatcatgcggttccagaaggggcgggagaaggcccttctggaacttaaagatttatatacagcttccatcaaggatgtgggggaggcaaatgctgccatttttgagatgcagcagatgattctggaggaccaggattttattgacgccataaccggtgtgatactggagcagaaactgaacgcagagtttgcggtgcagtctgcgtcggagcattttatcgagacgtgcgtccaggaagggaagaactacgtccaggggcacgatacagatatccgtgacgtgtcgagccgcctcgtgcgcattttgtccagaagctggaaggacaggctgcttaccgacgaaccgatcgtgcttgcggccaatgaactgtatccgagcgaggcagtgcagcttgacaagacgaagatcctcgggtttgtcacgagatacggtgcgataaactcacatactgcggtactggcaagaacgatgggtattccgtctgtcatcggactgggggaagcgctgaagaaagactatgacgggaagacgatcgttgtagacggttttgagggaaagatctacatagaaccggattataccacgctgacgagaatgaagcagaagaaggaaaacaatgtgtcacaggtaaagaatctggagcggcttaaagggaaggacaatgtcacccagagcggtcagaggatcgatatctgcgccaatatcgggaagcgggaggacatcgagaatgtactgcgcagcgacgccgggggtatcggtctgttccggagcgagtttctctacatggagaaccggcataagctgccgacggaagaacagcagtttcagacgtataagcttgcggccgaggcgatgggagccaaacctgtcgtgataagaaccgcggacttaggcggcgacaagccggcggaatgtcttgacttcggcgaagagaataatccggccatgggataccgcgggatccgcatatcgcttgataaggatgagatgtttaaaacgcagctgcgtgccatactgcgcgcatccgtgttcgggaatgtgtcggtcatgtttcctatgatcacctcgctggaggaggtgcagagtgcaaaactggtgctggagacggcaaagcgtgagctaaaggaagaaaagacggcgtttgacgaagagatacaggtgggagttatgatcgagaccccggctgcagtcatgatcagcggggagcttgccagagaggttgatttcttcagtattgggacaaacgatctgtcccagtatacgatggcggcagaccgccagaacgacaggataagcaggtattatgacccgcaccatccggcgcttctcaagatgatccgtattgtgacgaacaatgtccatctggaagggaagagaatcagtatctgcggagatctggcggcagatctttcgctgacagaattctttatccagataggaatagatgagttgtccgtgacgccgccgcaggtgcttggactgaggaagaagataagggatattcagtgattgggtagctgtaactgaagaaagagctggaatcagacgatcgggtctgatttcagctcttttttgtgctgcaatgggcaggtctcttttccttaaagtcaaaaagtattttgataatctttttgtcaaatgtgcataataatatcagaggctttttggtggttatttttggctgaatttaattgacaatgactgaaaatgattatattataaggtcagacgtggatgaacttggatgaaaatgaatgataatgactgacaaaaagactgggggtaatgtgatgctggcggaagaacgttataatgcgatactgagactggtaaatgataagaagacggttacggttcaggaattgacggagcagcttgatacgtcggagtctaccataagaagggatctgacggtcctgcaccggaaggggagtctcatcaaggtgcacggcggcgcgacggcgttaaatccggaattcatgacaaaggacgcggcgctgtctgtcaggagggacctgaatatagaagagaaggtggcgatcgcgaagtatgcggcggctctcgtggaaaaggacgactttgtctacatggatgcgggaagcagcgtggacctcatgatcgaacatattacggagcaggaggcagtgtatgtgacgaacgccataggtcatgcgcagaagctgctgaaaaagggctgcagggtatatcttctcggaggggaactgaaggagacgacggaggctattgtcggagcagaagccatagagggactgaagaaatataattttacaaaggggtttttcggcgccaacggcgtgagcagggaaaagggctttacgacaccggatatcacagaagcgctcgtgaaggaaaaagcggttgagaagtgccggaaaagttatatgctgtcagattcgagcaagatcaaccagatatcgcccgtaacttttgcggcgtttgaggacgggatattggtaactacaagactgaaggacgaatcatacagggcgtgcaggaatgtggtggaggtagaataatgatttatacagtaacttttaacccgtcgctggattatgtgattcagacggaaaagctttctccgggcggtatcaaccgggcggtgagcgaacatatttatccgggaggcaagggcaacaatgtctctgtcatactctcaaacctcggacataagagcagggcgctcggttttgtggccggttttacaggggatgcgctggaggagatgctgaaagcacggggctgttatacagattttatcagactggaagagggatttacgaggatcaacgtgaagataaacgacggacaggagacggagatcaacgggcaggggcccgctatcacacaggaggcgatcggggagctttatgagcggctggacagactggtgaaggacgatatccttgtactggcaggcagcattcctgacacactcccttcggatatgtatgaaaagatcatggagagacttaacggacggggcatccacatcgtggtggacgcaacgaaggacctgcttctgaatgtgctgaagtaccgtccatttctcataaagccgaacaaccatgagctcgcagagatgttcggcgctgtattaaatacggaggaagagatcatccggcacgccgccatgcttcaggaaaaaggagcgcgcaatgtacttgtgtccatggcgggggacggcgcccttctgctctctgaggatggagagatatacaggagccggccgccgaaaggagaagtgagaaattccgtaggagccggagattccatggtggcaggctttctcacaggttatctgaacacaggggatcatgaaaaagcatttaagctcgggatcgcggcgggaagcgcgacagcctttatgaactggcttgcaggcagagatgagataacagcacttctcggtgaacaaccgtcagcgtatggattataggaggacagagatcatgaaaatcgtagacttgctcaaaacgacgggcatagaactgaatggagctgtaaacacgaaggaagaggccattgaccggatggtggagctcatggcttctggcggcaatatcgctgatatagaggcatacagggcaggcgtctatcaaagagaagaagagggaacgacaggcatcagagaagggatcgctatcccccacgccaagacagatgctgtaaagtccccgggacttgcggctatggtgttaaaggacggcgtggactttgattcacttgacgcagagccggtacaccttatctttctgatcgctgcgccggacacggaagataatgtacatctggaggtgctcagcagactgtccatgctgcttatggacgacagcttccgggatgatctcatgaaagcggagacggcaaaagagtttctgtctgtcatagacaaagccgagcaggccaagttccccgaggaacaggaagagggaaaggcagaggaggttccggctgaaagaggatatcagatactggcggtcaccgcatgtccgaccgggatcgcccatacgtatatggcggcggaaagtctggaaaacaaggcaaaggagatgggatacacgatcaaggtggagacgaacggttccggcggggataaaaatattctgactgcagatgagatcgcagcctgtgactgtatcatcatagctgcggacaaggatgtgaaaatggcaagatttgacggaaaaccggttcttatgaccaaggtggccaacggcatcagcaaagcagagcagcttatcacggaggcggtcagcggcaaggttccggtctatcacagcagaggcggggaagaagagcgtatggccgatgacggggaaggactcgggcgcaaaatatataaaagcctgatgaatggcgtatcccacatgcttccgttcgttatcggaggcggcatcctgatcgcattgtcttttctcgtggacggggccaatgccgggggagccgactttggtaaaggcagcccgatggcgctgttttttaacacggtgggaaatacagcgtttggcatgatgtttccggttctcgccggatatatcgccatggccatcggagacagaccggcgcttatgcccggtattgtaggcggacttctcgctaaggcaggaacgtcggtcacgcttccggaagaagcgtgggtttcctccggttttttcggagcgctcattgccggttttgtggccgggtatctcatggtactgatcaagaagctgcttggcagacttccaaagtcgctggagggcacaaaaccggtgctgctattcccgttcctcggcatcctgcttatgggcgtgatcatgatctttgccgtgaatccgccgatcggggcatttaatacgtggcttaatgatatgcttgcaggcatgggcgaatcaagcaaaatacttctcggcgcagtgctgggcggcatgatgtccatcgatttcggaggcccgttcaacaaggcggcatacgtgttcggcacggcggccatcgcaagcggccagatcgatatcatggcggctgtaatgatcggcggcatgacgcccccgatagcgatagcgctcgccacgacgtttttccggaacagatttacgaaaagtgagaagcagacgacgatcacgaactatattatggggctttcctttatcacagagggggccataccttttgcggctgcagacccgctgcgcatcatcccgccctgtgtgcttggctcggctgtggcgggagcgctctccatggcgtttggctgcggctccagagcgccccacggcggcatttttgtcatagggatcatcgagaacgcaccgatgttctttttggcgctggcggcaggcgctgttgtatccatggccggaatcgtacttttgaagaaaccgcttccggcagacaaacggtaacaaattgtttataatagagaagtaagagaaggagaaaaagatcatgaaagaatttcaatatgtactcacagacagagaaggtatccacgcgagaccggccggtctgctcgtaaagaaggcaaatgaatttcagtcagagataaagatcgaaagaggcggaaagagtgccgacgcaaaaagaatatttgctgtgatgggacttggcgccaagtgcggggagcagatcgccgtaacggcagaaggggctgacgaagaggcggcagcagccgccatggaagcatttttgaaagaaaacttataatccactgcaaaaaaggaatggtctgagatgattacgttagaaggtaagagtgtttacggtggtatcgcgatcggaaagatcgcattttataaaagaagcgagatcacgatcaagagatgccatgtggaagatactaagagggaagtgaaacggtttgaagaggcaaaagtaaaagcctcacaggagcttcaggagctgcgtgacaaggcggtagaagatgtgggcgaggcgaacgccatgatcttcgagatacatcagatgatgcttgaggacctggattacgtggaatccatcgtaaatatcattacaacccaggaagtaaataccgagtatgccatcgggactacggccgacaatttcgcggccatgttccaggcgatggacgacgcatatatgcaggggcgggccgcagatgtcagggatgtgtccgagcggcttctccgcgtgctttcagagaacaaaagcggtccgatagcagtcggtgagccggtcatcatagctgccgacgatctcgtgccaagtgagacggtacagcttgataaagaaaaggtgctggccttcgtgaccatgtacggttccgccaactcacataccgcgattctggcaaggacgatgaatataccggcagtcataggcacgggggaaggactcgcacaggagtatgacgggaaaacagcggtcgtggacggctttgaagggaagatctacattgagcccgacggtccgacgatggaacggatgcagagaaaacagcaggaggacgcggcgcagagagaacttctgcagcagctcaaaggcaaagaaaatataactgcagacggacagaagatccaggtatatgccaacatcggcagcatggccgacgtcggggcggtacttaaaaatgacgcgggcggcatcgggctgttcagaagtgagtttctgtatctggagagtaacacgtacccgacggaggagcagcagtttggcgtatataaaactgtggcggagaatatggcgggaaagaaagtgatcatccggacgctggacatcggcgcagacaagcaggtggattatttcggccttgataaggaggaaaatcctgcgctcggataccgcgcgatccgtatctgcctgacgcagacagacatatttaagacacagcttcgggctctctaccgggcttcggcgttcgggcagatagccatcatgtttccgatgatcatctccgtggaagaggtgaggaagatcaaaggtatcatagaagaagtgaaagcggaactgaaggcggaaggcattcagttccgggaggatgtggaaaccgggatcatgatagagactcccgccgccgttatggtgagccgcgaactggcaaaagaggtggacttcttcagtgttggtaccaatgacctgacgcagtatacacttgcggtcgaccggcagaatgaaaagctggacgagttttatgacgcccatcatcccgccgtgcttgccatgatccgcatggctgccgaaagcgcgcacgctgagggcaagtggatcgggatatgcggagagctggcggcggatttgtcactgacgaaaacatttctttccatgggaatcgatgaactgtccgtgtcacccggtatggtgcttccgcttagaaaagtgatccgggaatcataaattttggcagatccgtttacataacgggtctgttttgttacactgatctatgttatactattaacgtaggaaagagagaacaaatactacgaaggagggaattcaatgttagaaaagctattcaaactaaatgccaacggtacagatgtgaagactgaaattctggccggcatcacaacattcatgacaatggcgtacattctggctgtcaatccgagcatcctgtccgcaaccggtatggattcgggggcgatcttcacggcgacagcgcttgccgcgcttattggtacgctgctcatggcagtctgtgcaaattatccgtttgcccttgcgccggggatgggactgaacgcgtactttgcgtacaccgttgtactcggtatgggatataagtgggaagtggcattgacggcggtgttcgtggaaggtatcatctttatcgtactttcacttacaaatgtgcgcgaagccatctttaacgcgatcccgaagaacttaaaggcagcggtgagcgttggtatcggtctgtttatcgcatttatcggccttcagaacgcgaatgtcgtgacaggaggctccacgcttatccagctgttctcactggacggctataatgcggcaaaaggtgtggaggcatcatttaacgacgtaggaatcacggttcttctcgctattgtcggcattatcatcacgggtatccttgttatcaagaatatcaaaggcaatatactctggggaattctcattacgtggatactcgggatcatctgccagtttgccgggctgtatgtgccgaacccggagatcggcttctatgggctgcttccggatttcagcggaggattatcagttccaagccttgcgccggtatttatgaagcttgacttttccggtatattttccgtgaactttattgtcgtaatatttgcattcttatttgtggacatgttcgatacgatcggtacgctgatcggtgtgtcctccaaggcgaatatgctcaatgaagaaggcaagcttccacgcatcaagggcgcgcttctcgcagatgccattgcaacgacagcgggcgcggtacttggaacaacgacgaccactacatatgtagagagtgcgtccggtgtatctgagggaggaaggaccgggcttaccgcagtgacgacagcggtccttttcggactggcgctgttcctgtcaccgatattcctggcgatcccgtcctttgcaacggcgccggcgcttgtagttgtaggattctacatgttgacgaacgtagtcaatattgatttcgaggactatgcagaatcgattccgtgttatatctgtattctggcaatgccgtttttctacagcatttccgaaggtatctccatgggagttatctcttttgtggcattgaatctgctcacaggaaaggcgaaggaaaagaagatcagtgtactcatgtacatactggccatattgttcatactgaaatatattttcctgtaatatagtgtaagaaggagatccccgtgtgacacatctgtgtcacacggggatctttctgtctgtggccggcccgggataagacggcggccgcttatatatacgattcactacgttttgatattttgaatctgcctatatattgtgtaatgcttcgtatcatgttatagtttatattataaaatacaacttgaaaaaggattcgtaaggaggaaaaaatgaaaatagcagtctgcgaggataaagaaaaagagcaggacctgctctgtgaactgataaagacagccatggcgcgccgggatgtggacgccgaacttgaggtgttcggtactgccggggagcttttgaaggctgcgaagaaaacctttttttccatgctttttctggacatccttctgccgggactttccggcatggacgccgcactgaagctgcggcgggaggggaactactcgccggtagtgttcacgacaaacacaaaagaatatatggcgcaaagctacagtgtatgggcggtggattatcttttaaagccccttgaacaggaaagtgtggacgaggcgttttcccgtgcgctcaaggttctggagggcacggagaagtatttggagatcatggtatcacggcatatcgaacgtattccatattccgatatctattatatgaaaggaaataaccgcaactgcatgatatatacccggaccggcacgtacaatccgtatgaatcggtgcagggcatattgaaaaaacttacagacaaccgctttcttaacagccaccgcagctacatcatcaatctggaccatgtgatcgcggtacagcggggcaaggcggccatgcgcgatgacgtgctgctgcccatccgcaggggtgagaccggactggtccgccgcgcgtgggaggacagacggtttgaagtcgtgggaaggggtgagtaaatgaatacagcgatacaactggcggccaggtatattctgtcggaagttccatggtacttcctcgcctgtgttccctttctgaaacagcggcgcgtttccaggacagtgatcggcctgatggccgcttttatgatcgccttccgggcagccagtgcctttgtgcttgtgctggcggttcccaactggctcaactatacggcgtatgcctatctgctcaactaccttctgcttatcaccttgtttatccgggcgttccgtgtttccgctgtccggctgttttatgtttttttactgatgtattcgatctcaacgtgcatcaatcagatcgcatatggaagtctgttttatctgtttccttacaaagctgccggagtgccgcgtttcacacttctgaccgttatgcagtttgccggcagtctgatcgtgatgccgtttttgtatcgattttgtaaaggcagtctgcagactgcgctggagcagctggataaaaaaagtatcctgctgctgtgcgtgacgccgctgacttttgcggtgatcgcgctagcctttgtggcctacggcgatacaaagccggttgaagatctgagcttgaatctgctgtatctgcttgtctccctggccggcattatcagttacttttttaatctgaagatgctgttgaacagtgcagagcggctgaacaaggagcatgagctggaaacgcggcttgcgctgcaggcgaaagactatgaaaatctgacccagagtatcgaggctgcccgcgccgcccggcacgacctgcggcatcaccttggagctatgcgtgactttgcggggcggaacgacacggcaggcatgcttcaatatctggacgaatattcggccagcctgccaggtgacgatgtgcccgactggtgtgagaacaggacggtcaatgccctgctcaagcattatctggccattgcggcaggggcgggagtgcatctggatgtgaagctggaccttcctatgggggccggcgtgccggacacagacctctgtgtggtgttcggcaatatatttgagaatgcggtcaacgcagccgcaggaggggaagacgccttcatccgcgcccgctgcgtaaccggcggagatgatattgtactcacggtggaaaacagcatcggctctgcggcttcccacggagaggggctgggccttaggaatgtggaggcagccgtaaagaaaagcagcggcacggcacggtttgagaaaaagggcagtgtctataccagcaaggttattttgagaaaagtacagcagagcggggggcgtcgccgttaatgcggcggtcttgctttttccggtctgccgttttcaccttcgtatgttcttccccatccggtaaagacagaaaataacagtacgagaaaaagagagaaacagtagaacataaagccggcgacctgagttactgacagcgcgtccgcatattcgtatcccgctgtcagggaagagccgatgaatacaaagacgcttaaaaatggaactgccaggacgatggagttggcaaagccatccagaagattagctctgcggtacggatgaagccctgcacgctttcctatctcattttgtatcttcccgaaggttgccatggaggcgcttgtcactccgccgaagaacatggtggtgacagagatcccaagcatcatggcggtctcggcgccgcgggagctttggcctaaccggctgttcaggatcagatcggttattttctcaagcgccccggcagccgtgagcacgcccatgatcccatatacggaaatgacgagcgttatcgtggcgatcattccgtttacaccgtccgtcagaaagccggccggcgcgccgtcctgtacggaaaggacactctccggcgtgagcaggtgaaacgccaggccgacgatagtcccgaggatcagtcccaccgtgatcgccttgtatatattccgtgtcctgaccgcggtaaagagcattacagcgacagggacgagcatcacgagcgcggcgggattcctatgttctctcaggatatcctctgcaccggtgccgagagtaccgccgcctccgaagatccagaacagaacaaaggaaataatgcctgcggcaagggagtattttaaccggctggccacacagccgcccacatcggcaaagccggactttttagtatattcctgcgttcctgccgagatgatcgtcgtgtcggagataggagccagattatccccgaagatcccgccgcacacaatggcgcctgcaagtgcggcaggatcgctgccaagtaatatgcccgccgcatagaagatcgggaagcaggtaaacattgtgccgagggaagagccggtcgcggaggcaatgacacacacggcaaagaaagtaaatgccgtaaacaggccgccgccgacatgcagtctgtccgcgagccatacaaagccggtcgatatgtttgccgctttgatcattgcggagaacatcccgataatgagcagaaggatcgtcaccgggaccgcttcctttgccccgcggtagactgcttcccaatatgcctcataatgtcctttcttagtaaagagagcgctgatcagaagagcggtgagggctcccatcgcaagcgcatacatttcaaatgcttttaatacgacaaaatataagatacagaagaacaggaagatgtatacgggtaagaatgcaacgctccagcctcccttgaattcaagttttttcttttccatgtctgttgtcactcctttggatggtttagctttgttctttttcgttgatattcatgtgcataatgctgcggtatttggagccgggggtgcgttccagttcaaacggttccccttcgggggcaggaaactgctgtaaaaatgcgcgtattgtctcaatttcctcctcatccaggtcgaattcaaagatcctggcgttagacgctacgtgccggctgttgcgtataccgatgatcgcgccggcgacgccggcctggctgagaatatatttggaagccacgttggagatgcctgcattatatttctctgcgatcttggacagcaggccgagcagttcctgatagccgtcccagccgagggtgtcctcaatgatctgaagatatttgacctgggagcgcgtctccggctcggccatgttctttccaagccatttttccgcgagaaaaccaccggataacgtaccatagcagaggagtttgataccgttggctttacagtaatcgagcatgttcctctccggcctccggtcaaatacggaatactgcgcctgcatggatacgacgggaatgcctgcgtctaccagctctttcaggcgggcggtatcaaaatttgtgactccgatattgcggatcttgcctttttctttcaggcggagcagatggccggcagtctctgtatatccggggacgtcataatcccaccagtgaaactgtacgaggtcgagcgtgtcgcggtttaagcgcttcaggctccggtcaatgatctgttcggtaaaagcgtagtctacctggcttaagtaattgatatcgggcacatacttcgtgtggatctgaatgtcatcggcggatattccatgtccgctctttaattccttcacaaattctccgataaattcttccacgcccgtatagatatccgcgcagtcaaacgtagtaaatccctgttctgtcaacaggtggaatgccttcatcacgtctttaagatccaggcggccctgcaggctgtgtccttcggaaagctgccagcagccgttcagtacccggcagatcgtataatcctttgtcagttcaatcctctgatccatttttaatttcctccatattcattgttatgtcttcttttgtggaatgtatcttttctaccgtacattcagaatgccggagcgtccggggtctggtccgggttattttaaaccttgccccgcagtttgggtccgggcaggcaatgatgctgtcggagagcatccagtcgttttcgtgcagttccctctgtttggcgggaagaagcggcaggagagcggcgagggaatacatggaaaatgaggtcgtctggggaaaaacgaggttttcgccttccacgaggaaatagtccccttctctgtggcggcataccatcggcttatccgagctgatcacctccactttcagatcatacagtgtaaattcatcgttcatatgcaatatcctttctcattttgatttggaataaaaaaagcctgcccctgaatacaatagattcaaggacaggccatgcctgcggtaccaccttgtttggtatacaatatacccactttacagaatgcgatcacatccctggcctttaacgccggccctgcgtctcggctacttgtctgacgttcaccttgccctctgaggcccacttgctggcactgacatctgtccggctcacaccgtcccggattcgctgaagaccgtttggcagcaaaacttccccatctgcggtttctgatttctgagtattatagcaccgaacaaacagtgatgtcaatgaatcatatcataattttgtaaattacagtgtattagtaaaaacacggtatatgtgttaaaatataaaaaataagctgaggaggatttgccttatggataaaaagataatggaactgcccgtcgtaaagaaaatcgcagaagcccgggaacttgcgtgggtgaacccgaaacttaagccgtttgcggacgtaagtcttgaggtggccatggcggatatcgaggacgccgagaaaagactcgcccgcttcgcaccgtttatcgtcaaatgcttccctgagacggcagaccggggcgggctgatcgaatctgctctgactccggtgccaaagatgcaggcatacgtgaaccgcgtatatggaagcgcccttccgggaaggctgctcttaaagcaggacagccatctggccattgccggttcggtgaaggcgcggggcggcatctatgaagtgctgaagcataccgaggatctggcgcttgaggccggcctcataacgatggaggacgattattctgtccttgcgtcagacgagtgcagaacgttcttcagccagtatacgatacaggtcggctctacggggaatctgggcctgagtatcggaattgccagcgcggcggtcggatacaaagtcatcgtccatatgtccgcggatgccagacagtggaagaaagacatgctgagaagccacggcgtcaaagtagtggaatatgagtccgactacagcgaggcggtaaagaacggaagaaggcaatcggatgccgacccgaagagttacttcatcgacgatgagaactccaaaaatctttttatgggttatgcggtggctgcaaaacggctgaggacgcagcttacagaactggacgtaacggtagacggcgatcatccgctgttcgtatatattccgtgcggcgtgggcggcgctccgggcggagttacgttcggcctcaaggaactgtggggggacaatgtgcactgcttctttgcagagccggtgcaggcgccgtgcatgctgcttggaatggcgacgggactccacaatgatatctctgtgcaggacgttgggcttaccggccttacccatgcggacgggcttgccgtagggcgtccgtcgggatttgtaggtaaagtgatggaaccgctcttaagcggggagtttacgcttgaggataaacggctgtatgattatatgagagattttcttgagacagaagacatcttcctggaaccgagcgcgtgcgcggcgtttgaaggtcctgtcagactgctgcagtacgaagagacaaaagcgtacatcatggagaagggcctgtgggataaaatggacgatgcggtccatattgcatgggcgacgggcggccggctcgtgccggaggacatccgggaggaatataagaatacatatcttgatcaataacgggggacaaaggaggcaggaaccacgatgaagcagataaaggtagaggacgcggtgggaagcgtactgtgtcacgacatcacacagatcatcaggggcgtcacaaaggatgcggtattccgcaaagggcatgtcattacagaggaagatatcccggtacttttgtcggtcgggaaggaacatatctatgtatgggaggcttcggaaggcatgctgcatgaaaatgacgcggcagagatcctcagacgcatttcccagggagcgcacatgcatccttctgctgtgaaagagggcaagatagaacttatcgcggactgtgacggtctgctgaaagtggacaccggaaggctgcatgcggtgaattctctcggcgagatgatgatcgcctgccgccacggcaattttcctgtgaaaaagggagacaagatcgcgggcatgcgcgtcataccactcgtcatagaggaagagaagatgagacaggcggagacattgtgcggacgaaaaccgctctttcagatcctgccttttggcaggataaaggcggcggtcgttacgacgggcagcgaagtatacagcgggaggatccgggatgaatttacccctgtcgtgatcggaaagctgaaggagtatgaggttgaagtgatacgcacggtcacgtgcaatgacgatcctgccatgacggcggaggctgtgcggggctgcctgcgggacggcgccggtcttgtcatctgtaccgggggcatgagtgtggatccggatgaccgcacgcctctggcgatccgcagttgtgcggatgaggtcgtcacctatggggcgccggtgctgccgggagcgatgtttatgctggcatatgcggccggtattcccgtgatgggactgccgggctgtgtcatgtatgcgaagcggacggtattcgacctcgtgctgccgagagtgctggcgggcgaaagactcggcgcggaagattttcagtgtcttgggcagggaggactgtgcctctcctgtccggtgtgcacattcccgaactgtggatttggaaagggagcttaacgatggatacactatatgagctgatacaaaaccgggacgccggagaagacaatatgacagcgcttgtgatcgccgggactgcccagggggaaaaggtctttctgtccggccgtgaagtcatatggaagtctggggactgtccgtttcttacagggcatcttgcggagcttaccgaggtacagggaaacggtgtcatcgagcttgacgggcagagggtattctgtgagtacaccggctgccggaaagaacttgtcgtctgcggcggcgggcatgtgtccgtaccgatcatacagatcggaaagatgacgggcttttacgtcactgtactggaggaccggccgagatttgcggactgtgccagaaaagccggcgcagatcaggtgatctgcgaaccctttgcggatggtatggataaaatagaaggcagcacggacacttactttgtgatcgtcacgagaggacaccggtacgacagtacctgtctccgtgaggcggtgaagaagcctcatgcctatgtcggcatgatggggagcaggaagcgggtcggtatcgtccggcagcagctgaaggatgaagggacgcccggaacgcttctggagagcgtccatgcgccgatcggtctggatattgacgcagagacgccggaggagatcgcggtgtccgtcatggcgcagatcatacaggtgaagaacagcagaaggaggaacgaagcctatgtgccggagatacggaagtatctgacagaaacgccccggcaggggctgaggagcgtgctcactgtcatcgtctccaggaaagggtcggcgccgagagagaccgggacaaaaatgctcgtgagagaggatggacagacgtttgggacgatcgggggcggatgtgcggagagtgaggtcatcaaaagagcgctcctgatgatgcgtgaggaaaaggcggcagaactttgtacggtcgatatgaccggacaggaggcggaagatgccggtatggtctgcggcgggatcattgaagtgtggatggaatcagtgcccattgacaaggcctgacaacgatggtactcttttgaagtatgagttttacacaggaggaagagagaatgggaaatgagaaaaacaagacatattcaagtccttacgagctggagggaaggatcccgtttggacaggcggcagtgctgggacttcagcacgtgctggccatgtttgtagggaacctgacgcctctgctcatcatcggcgggatgtgcgggcttggagatgcaggtgtgctaagagatgtacttcaaagcgccatgctgatcgcaggagtggtatcactcgtccagctgtttacgatagggcctgtcggagccaggctgcctatcatcatgggaacaagttccggatttatcggagtgagcaagggtatctgcgcgtccatgggaggcggcgtgatcgcatacggcgccatactcggggcaagtctgatcggaggactgttcgagggtgtgctcggtttctttctgaagccgctgagacggttttttccgccggtcgtgaccggtacggtagtcatggcgatcggtctgtcactcatatcggtcgggatcaattctttcggcggaggaaacacgaacggggatttcggatcgccggtgaatctgcttgtgggagctgtcgtgctcataagcattatcctccttaagcatttcacgaagggcatcagcagcgcggcgtctatccttttcggcattatcatcggatatatcgtatgtgccgtgctggcgctgttccttccgactacatatgagtatgtggatgcagagacgcagaagacgatcaccgccacatgttcctgggtgctcgactggggcaaggtggcaggagcggactggttttcgctgccgaagatcatgccggtcaaatttgtctttgacgtcaaagcggtcattccgatgctgatcatgttcgtcgtcacagctgtggagacgataggagatatttcgggtatcacggaaggaggacttggcagggaagctacagacaaggaactgtccggcggcgtcatatgcgacgggctcggttcttctttcgcttccttcttcggagtgctgcccaacactaccttcagccagaatgtaggcctggtaggaatgacgaagatcgtcaatctgtttgcgctgtccataggagcggtcattcttgtgttgtgcggcttcttcccgaagatcgccgccctgttcgagatgatgcctcagtctgtacttggaggggctgctgttatgatgttttcatctatcgtggtcagcggcattcagcttgtgacgaagagaggcgtcaacaacagagttgtcacgatcgtggccgttgcgctcggctttggatatgggcttggctccacggcggacgtgctgaatcagctcccgcagtgggtaggatatgtgttcggaggttcgggtatcgtgccggcggctctcgtggccatggcgctcaacatagcgatcccggaaggaagagatccgtttgcaggagaaaatgagggataagagatgaacttactgacaatggaaggggtcacgaagtcctatacagacaagattctgctggacaaagtggacttcgcggtcaatgaccatgaaaagatagggatcgtcggtgtcaacggcgcgggcaagagtacgctgctcaaggtcgtgtccggcttggaggcggcggacggcggcagtgtaagttccggcaagaatgtgaagctgcgctatctgccccagaccccggtgtttgacgggggcgccacaatactggaggcggttctgaaagataatgcagacaaaagtaacgaatggacgatcgagagtgaagccagggcgatgataaaccgccttggccttccgtcctatgacacaaaagtggatacactgtccggaggacagaagaaacgcgtagcgctggcgggggcgcttctggcgccggtggaaatacttgtgctcgatgagccgaccaatcatctggacggggcgatggccgagtggctggagcagtatttgatcagatttaagggcgctatcgtgatggtgacacatgaccggtattttctggacagagtcgctacgaggatcgtggagatcgagcgggccaggctctataattatccgggcaattattcggagtatgtgagcctgaagatgcagcgtcagtctatggagaacgcggccgagaggaagaggcagagcctgcttcgtacagagcttaagtggctcgcgcgcggcgcgcgggcaaggtccacgaaacagaaggcccacatccagaggatcgagacacttaaggaacagagcgcgccggaacaggaaaagcaggttgccatgagttctgtctcgtcccgaatggggaaaaagacgatcgaggtgtcacacatagcgaaatcatacggcgggcgcactgtgatcgaagattattcttatatctttctcagagatgaccgtatcggtatcgtaggggagaacgggtgcggcaaaagtacgctgctgaagatcattaccgggaacctggcgcctgattcaggttttgtggacatgggagagaccatcagagtcggttacttttcccaggaaaatgagtatatggacgactcgaaacgggtcatagattatgtgaaggaagccggcgagtatgtcacgataccggaggggacggtcagcgcctcccagatgctggagcggtttctgtttgacggggcgcttcagtggagccggatcgaaaaactgtccggtggagagaagcgcaggctgtatctgctccgtattctcatggaagccccgaatgtactcgtgcttgatgagccgacgaatgatctcgatatccagacgctgaatgtgctggaggattatctggacagattcgacggcatcgtcataaccgtatctcacgaccggtattttctcgaccgtatcgtgaacaggatcttcgcctttgagggagaaggcaggatcgcccagtatgagggaggctattctgactatcttctcaaaagcgccgatgccggggaggccgcggcgccgggaccggagagagagaagaaggcgaaagaagagaggtcatggaagtccggcccaaagaaattaagatttacttataaggagcagcgggaatttgaagtgatcgatgaaaagatcgctgaactggaggagaatatcggtgagctggaagagcgtatcaccttaaatgccacgaattccgcggctttgaatgaactgatgaaagagaaggaagaggcggaacagaaactggaagatatggtggagcgctgggtgtatctgaatgacctgaatgacaggataaacagccagagttagtcattgactcgtaccttttcgtgtgatacgatgaaatcagaaaaaacaaaaaacatggagacttatataggttcataatcggttgaacgtttctaccaactaccgtaaatagttgtctataagtatccgcagaggtaaaagtctgcgggtatgtgcagacttttacggaagaaggaggtttgaccggtgaatgaatctgtttttattttacgaggagatatctgctgcagcaggagcctgacggagcttacggtgcagaaagacgggtatgtcgtatgcagggacggaatatcagaaggaatatatgagtgtcttcccgacagatataaggactgtccggtgcgggatacgaagggggcgctcatcttgccgggacttgtggatctgcatattcacgccccgcagtatacattccgggggcttggaatggatctggagcttctggaatggctgaatgagcatacatttccggaggaggcaaagtatgcggatatcgaatacgcgaaggaagcctacggaaggtttgtggagaagcttaagtacagcgccacaacacgggcatgtatcttcgggacgatccatgtgcctgccacggagtatttgatggatctgctggaacagtcgggtctttgtacgatggtgggcaaggtgaacatggaccgcaatgctccggatcctcttacggaacagagcgcggataagtcggcttatgacacggtggaatgggtcaaggactgtctgaagcggtaccggaagacgaagccgatactgacgccccggtttattccgacgtgtacggatgcgttgatggagaatctgaaaaagatacagatgcggtacggacttccggtacagtcgcatctgtcggagaacgtaagcgaggtgggctgggtgcaggaactctgcccgggatcagagttctacggggatgcgtacgacagattcggcctgttcggggcggatacaaggaccgtcatggcgcactgtgtatattccggcgtgcaggagcgcaggcggatgaaggagaatggagtgtttgccgcccactgtccggaatcaaatatgaatctgtcgtccgggatcgcgccggtcagggcatttctggacgaaggaataccgacagggcttggcagcgacgtggcgggcggaagtacggaggatctgtttgccgccatggcccatgccatacaggcatccaagcttcggtggaggctcgtggatgatacgttaaagccgttgacggcggcggagagtttttatctggcgacaaaaggcggcggcgaatttttcggcagggtcggaagtctggaggaaggctatgagtttgacgctgtcgttattgacgacagcgcggtgtcggaccgggagaaggcagagatatcggaacgccttgaacggctcatatatttaagcagcgaggcaaagatcaccggcaaatttgccgcaggtgaagagattttctggaggtgagcagatggagcagcgcaggagagcagtgggaacgagtgtcaaccgggtggacgcatatgacaaagtgacaggccgggccagatacacggatgacctctgcgggaaagaggcgtatattgcgcgggtggtacattctaccgtggcgaacggcagagtattgtctgtggataagtcggaggcagagaagctgccgggtgttatccgggtagtctcctgctttgacgtgccgaaaaattattatccgacggcgggccatccatggtctgtcgaggaggcgcatcaggatgtgtcggaccggctcatgctgacggaccgcgtgcggttttacggagatgacgtggcggcggtcgtggcggaggatgaagtgacggcggccagggcggcggggatggtgaagatagagtacgaggaatacccgtttgttctcgatgtccgggaggctatggaagacggcgcgccgcagctgcacgaagactatccgggcaatgtgctgaaccacacaagtatccgaagcggcagctatgaggaggccataaaggagccgggacttattaaggtggaaggatggtatgataccccttccgtgcagcactgccacatcgagaattttatctgttacgcgtatgaggcggatcataagatcaacgtgacgtcatcgacacagatccctcatatcgtgcgaagggtcgtagggcaggcgcttggcataccgtggggccgggtgcgcgtcataaagccgtatatcggcggcggattcggcaacaagcaggatgttctctatgaaccgctctgcgcttttttaagtacattgtgcggcggacatcttgtgaagctggatgtgagccgtgaggaggcgttcaactgtacaagagtgcgccacgccatacgcagccatatcatatcgtgggtgaggccggacggtacatttgccgcccgcaagcttaccgcgtattccaatcagggagcctatgcctcccacgggcacggcgttgtcgcaaaagggatgggagcgttcccgcagctgtatccgtgtccgaatgtggaggcggattcgtatacggtctttacaaacaggccggtagccggcgccatgcggggatatgggattccacaggccatgtttgcggtggagagtcatacagatgatgtggcgaaggcggtcggcatgtccccgctggaattcaggagaaagaatctgatgccgcaaggctatgtggacgcattttccaaaaatgaaaattactttgacacattcaatcaatgtatggccaaggcggcggcctatatggattatgacaggaagataaaggagtatgccgggcaggacggaaatatccgcaggggcatcggccttgccgtattctggtataacacggccgtatggcccatctcactcgagacgtcctcgtgcaggatggtgctgaatcaggacggttcgatccaggtgcaggtaggggagacggagatcggccagggggcggacaccgcgttttcccagatggcggcggacgccctcggcataccgtttgaggacgtacatatcatctcatcccaggatacggatgtgacgccgttcggcacgggagcgtatgcctccaggcagacgtatacggcaggcttttccatagagcagacggcggggcttctgaaaggacgcatactttcctatgcgcaggaactgacgcggatgcctgcaagccagcttgagctggtggacggcgtgatcgtgagaaagagcgacgcccgtccgatgatgacgctgggagagctggcgtctgaggcattgtacagcttaagccacagcgagcatctgacggcggagagcacctatcagatcaagagcaatgcgtattccttcggctgcacgatggcggaggtggaagtggatattgaggcgtgtaagataagccttatggacatcgtaaatgtccacgactgcgggaaactgatcaaccctgccctcgctctggcgcaggtgcacggcggcatgagcatggggatcggatacggcctgtccgagatggagaagttcgacgctgccaccgggcggacgctgaacggcaatctgctcgattacaagctgtccacggccatggaccatcctcacctggaagggcagttcgtggaaaattatgagcctacgagcgcattcggcacaaaggcgctcggggaacctccggtctgttcggtagcgcctgccatacgtaatgcggtgctccaggcgaccggcatcggcatagaccagattccgttgaatccacatgtcctgtttgaggaatttaagaagggaggcctgctggatgtatgatataaaagccttatatgaggcggaaaatatatcgcatgcaattcaattactggaggaacacccggacgccagagtgatcgctggaggaagcgacattctgatcaagatacgggagggaaagctgagacagccggagctcgtgagtatctacggtcttgacgaacttaggggcgtcagcgtaaaagaggacgggacactgcgcatcggctcgctcacaagcttttcccacataacaaagaatccgctcatacagaagcatataccggtgctcggcgaggcggtcgataaagtgggcggtccccagatacgaaatatcgggacgatcggcggcaatacgtgcaatggcgtcacatctgccgactctgcgtccactctttttgcatatgacgcgcaggtggaactggccgggccgaagggagtgcgcaccgttcctgtccaggaattttatatcaaggcaggaaccgtggatctgaggcacggggagatagagacagccatactgatacgaaaagattcctatgaagggtacgccggacattatatcaaatatgccatgagaaatgcgatggacattgcaacgcttggctgttccgtgaacgttaaacttgcagccggcgggaagcatctggaagatgtgcggatcgcgtttggcgtggccggccccgtaccgcttcgctgtccggcggcagagcaggcggtgaagggaagggcggcaggcgaagagacgtatagactggctgctgaagccatccttcaggatatccatccgagggacagctggagggcaagcagggcattccgggaacacatctcgcaggtgctcgtcaaaagagcacttgcggaggcagtgctgcgggcgggaggtgaagcgcggtgaatgataacagatatggaggaaggacggctttggagagacagtacaaacatgtgcgatgtacgatcaatggtaaagcggtggagactatggtcgatgtgcgcgcttccctgacagatctgttgaggaacgactatcatctcacgagtgtgaaaaagggctgcgaggtcggcgaatgcggcgcctgcaatgtgatcatagacggcgagtgctataactcctgcatctatctcgccgtgtgggcggacggaaaagatatccgcacgctggaagggctcatgggcccggacggagaactgtccgatatccagcaggctttcatagacgaggctgccgtgcagtgcggcttctgtacccccgggttcattatgagcgccgtggagatactcgagtcgggcagggagtatacgagagaagaattgaggaagctgctgtccggccatctgtgcagatgtaccggttatgaaaatattctgaacgcggtggaaaagacgatgaaaaaacggctttcactgtgactgtgatataaaggtagaataaaatgactgcgcgtatcccggagggatacgcgcagcggttttttgtgttcctgctactgtccgtcgccgctatccgcacaggggatttaggcggcggctccggtgcgcccgcttgcagggcgttgacccccgcccagcaagagcagcgcacccagccataaagagcatttcagccgggatgccagttttgtccgataattctttccgcgtttatccatgacgctttgtatagcggcgtttccgatagaacagcagggaggcgccgcccaggagggccgccagcattgccggcagccagggcaacgggctcgccgtatcgccggtccgcgggatggtggaatcgttgatggtggttgtgctgctgggctgcaccgccgcggcgaagggcgacagactggaaaacgtaccttttgccacgccattttccaccgtgaccgtgcggctctccagtaccttgtccttgcagtggagcaggagcaccgtctggccgtcgtacttggcatccacgggaatctgcacatccagatcgccggtgtagctgccggaggacagactgaggtcatagagcacgatcagctcgcccttgtcctgtctcgcgcggatgtcgtcgcacacatcgcagattcctttcgcgtggagcagtctgtccttcaccacaagaaccgcgtcgtcggtaaaatagctgctcactttcacaccagtgtccgggtcctccaaagtgtgaagggaataattcgggccggtgggcgcgatggtttccctctgtaacacataatggcaaaccgtacatgccttgtattggctgcccgcctcggtttcggtggccggtttgtcgatcgtccactcgcttgcggtgtgcgccgcctgctttgatctaaccccatcgcccgccgtacatgcgtgccagtgtgaattttcgtcatagctccaggccgaatcaaaggtatggctgtggccggggtctgtttcattgataaagatagcctcgatcttaacatccgcgccgggcatggtaaagatggtttcggcactttgatcgttctcaaatctgccgctgcccagcgatacccatttgtcaaacctatagccggcaggcgcgtcgtccgccttgattgacacccgcgcaccctcgatgtaggggcctttgttcgttctatccgtcccgtttatcaccgtgagcgtgtaagtggccgccgctgccgtggctttggccgtattggacgcagcaccttcgcctttttcgttgaccgcccgcacttggagggtgtattcggtgccgttggtgaggcccgtcactgtgtaggtggtagcggtagccgaattgagaatatccgtccaatttcctgcgccgggagacaccttgtactgatactttgtgatggcgctgccgccgtcgctggccggagccgcccaagtcaatttaacctgtttgtctccagcctcggcttttagatcggtgggcgcgccgggcacggtcgccgccgttggcgtggctatagctgaattggatgcaatgcccgcgcccgcgctgttgactgcccgcacttggaaggtgtattcagtgtcgtttgtcagaccttttacggtgtaaaaggcagcggtgctggaatttggaatatcctgccagtcgcctgaaccgggagacatcaaatactggtatccggtgatgacactgccgccgttgtcgccgggggcagtccaaaaaagaatcacctgcccatcgaaggctttggttgctaaattggtgggcgcaataggggttagacgacggttgatagttaccggcttctgttggttgccggtgaattgatagccaggtacttcgatgagaaccataaacgaacctgaacccaccttttcaggtgttgttacgttttcaatctccagcacccaatctgtttttattaatccttcgtccaccaagcgaaccttatttgcggaaaagccctcaccggctttgatcgtaatgctgtccagtgtaagcggtataggtacgtcgaacttgagggtgatctgagtgctggtctccaaacccttgacaccgtttgcttccagcgcttcaacctcaacaagggcctcttccgattttagcgtgatgttggcatcagtgatattgttctcatcgagagtgaaggttgtgctggtctcatagtaataaatatcgctaatggtaatatttcccaccatcacatgataagtaccgggattgagcttatcgaaagtatattgaccggtgctgccttttgtgactgtcgtggcaatcggctctccccattcgcccgtcagcttcacatcaaagggtatggaaagcgggccatctgccgtcaagatcgtgccggacagcgataaggaaccctctccagaaggcgcaagataaagattctgagtgacgtccttatctttaatggtgatttgttcgttgcattcctgaaagaatacccctgcttgataccatcccgccgggacgtgcaaacgataggttccaggcacgatattcaacagatgaaatcccccgccatctgccgataccgttttcgtcaccaagttattatccagattgtagagctctaccggcacattttcgagtctataggaactatataaaacatctcccaagattccgtatttatccggatccgagaccggattcaaggaaaaggtgaagtcgcacgttccgccctcaggcaccgttaccgttgtttcctggcgcgcaaaattaagctgttctttgtcgctagtaatgacgtcttgcgctggcagcaccacacgatagctcccaggtgtcagccctacaatatcagcaatccctctatcatttgttctttcgtcaaacagaaattctttcccctgaaatacttgtacgatcattcccgaataataattgtgacgattgaccacaacctttatatttagcgatccgcttccaggtacattgtagggttttaatatgaaattcgctacagaaaactcctcataatcgtcggttattgtaatctcctggctctgaagcgtataatagcgcccgttttcttcccgttttccgccgacctccacagtataggttccaggacccggtgcaataaaacaagaattgttaggatcactgctcgtcgtcagtgtctgtatcaccgacccgttttgcagaagccgggcctccacggacggcgatgttgagctaccagacgaaccagaagacgaaacagaagttattactacaatgtaggccgggttctggatgtcgtttgatgccggcgacatcagagtgtccatcaccgggcgcactgccacagtgatgacgggcggctccagcccatcagcggcttcgtaaccctccggcagcacgcaggtaaaagtgtattgtcccgcctgttccgggtcaaagttcccacacgtccacaccacgccctctatagtaagcggagagcctttggtatcctcgccggtgaggatatcgggcaggttcacatctgtctgagaagtgatggtccccaagacaaattcctggatcagcgcgtcgccgggcagggcgtccagcttcgctaccgtgacgggaacggatgcacctggttctagtcctccgcaagtttcatcatgcacgtggttgcagggcgtaccctccacagcaggggcatagacgcaattctcgtcgtgctctgtgtgaccgcagggcatcccctcctgggcaggccggtaggcgcagccctcggcgtgattgtccccccccctgcagtacatgtcgcaggggatttcctcagtccccacgctgtagccgcaggtgtcgtcatgtacgcccagcgtgtgcttgcagggcgtcccttcttcggcctgtatgtagccgcaggtctcgttgtggacatgggtacagccgctgctccccacggtgtcggacacccccagcgccagcacaggcaggccgaacaactggcagacaagcgccgccgccagcgcgacgctcaaaagtcgttttgtgaatctgaatccacatcgttttttcatgttccttcctccttcacatcacctttaaagtttctaaaaagcacaacaaaagccgttccgcgcaaaggcgcaaaacggctttataaaaggggatagagatagaagaagatgggtcacaaaaaagggcagacttatcccgcctgcctgcgataaatgtacacgattttccatcattgtcaagaccccctcatgataattgtgctttttgttttgtaagaaagcaaaacagaaagccctaaatggactttctgttggtttccctgtatgcttgcttacattttatcacaggaggcgtaaaaaagggcgaaggttgagaattttataccttcgcccttgcgctgttctgtctttactcggcaggccgccccgccaccacctccaacgtgagcggtccccgtacgtaagttgtcgcctgctacgcggtcaaatcccgtatccggttcagattcaccagcccgttcaccagcttggcagggcacttccccgcggcagcgatggcgtccaaatccacaatcgtttcctcgtcgtcggttcccgcccggagcttctggcggaaattaaaacagaagaaaataaatgttgacaatacggcatgcttctcatataataaagcacaaataattctatcagatgttttttagaagaaaggatattaccgacactatggacgacgccgacagtagcgacgctgaccaatgtatttattataatgttttagataagagatcaacagggataacgggcatgatctgcgcttctttacagaggcggcaggttgtgcctttttgtgttttttaccgctgatcctgcctgttgaggcaatcagataaattaaattaaaaaaagaagggagtggtatatccaatatggataatcacagacagatgccttggcattccatgcagatcgaggaagtttaccggacactcggtacttccgcggaaggtctaagtgatgctgaggcggccgaaaggttaagaaagaacgggcgcaatgaactgcgccggaaaccgccgaaaacaatttctcagatgctcagagagcaggtgacagaccctatggtgctcatactgataggagctgccgtgttttcagctgttctgggagaatggacggaggcggcggtgatctttacaattgtaatcattaacgcagttatcggaatcgtacaggagaagaaggcacagtcatctcttgaggcgctccgcaatatgagcgcactcactgcccgggcactgcggcagaaggaggagagcatcatcccggcagcagaactggtggagggagatgtggtgtacttaagcgacggcgatatggtgccggccgacataaggctgactgaatcggccaatctgaaggtacaggaggcttcccttaccggtgagtcgctgccgtcagaaaaagaggcagatgcggtccttccgggagagaccgttctcggagaccgacgcaacatgttatatcgttcttctattgtcacttacggccgggcggtgggggttgtggcagccaccggtatgcagacggaagtgggcggtatcgcaggcatgctcgaaagcgaggatgagctggatactccgctgaagcgcaaattgaatgcggtgggcaggacattgacggcagcaggtcttatcgtctgtgtgttgatatttgtgctcggagcattgtatgaacgtccgatcatcccgcagtttctcgtggccatttcccttgccatatccattattccggaaggcctcccggccacggcgacgatcgtgatggcgcttggcgtccagcgcatggcaaaacaaaacgcgcttatccggaagcttcccgcagtggagacgctcggcgaagcgacagtgatctgcagcgataagacaggtacgctgaccttgaataagatgaccgtgacccatgctgcggcaaacggggactttgaggcgggcagggcgatacctgtaggggaggctgcaagacagcatccggacgtctaccgggagatcgtctatgcggcggcgctctgcaatgacgcaagccttgacccggacgagagcggcggaatcatcggggaccccacagagggcgcgctcatatatatggcgcaggaattcggtattgaccatgagtcgctggaagatacgtatccgcgtctgtttgaacagccttttgactcggagcggaagcggatgacgacggttcaccggatagacggcagttatgtggcttacacgaagggagcggtggatgagatgctgcctctttgcagccatattctgaccgcgcagggcgtacgccccatgacggaagacgaccgggccaatatcctggcgctctgccggaagatgtcggaagatgccctgcgggtgcttggattcgctctgaggacaatacgtgacatacccgataaggacggggaaaatgtagaagcagacatgacttttgcaggcgcgctcggcatgatcgacccgccccgtcaggaagtggccgattcggtgcgtatctgccggaaggcgggaatccgcacggttatgataaccggagaccataaggtgactgcgcttgccatagcgaaggagcttggtatatataaagaaggggatatggtcatatccggagaagaactggatgccatggacgacgaggcactgatggcttcggcgggctccgccgcagtattcgcccgcgtgtcgcctgcagataaactgcgtatcataaaagcattaaagcgcgccggagagatcgtcgccatgaccggggacggcgtgaatgattcgcctgcgctgaaggcggcagacatcggagtcgccatgggaaagacaggtacagatgtcgccagagaagcctccgatatgatactgctcgacgacagctttactaccattgcctttgccatcaaggaaggacggcgcgtgtaccggaatatacagaaggtaatacagttcctgcttgtgggtaatatcgcggaaatactgaccttattcgcggcgacggtctttaactttgacgcgcccctgcttgcggttcatattctctgggtgaatctggccacggctacgctgccggcgctggccctcggcgtcgatcctgccagcagaaatatcatgaaacaccagccggtaaagtcaggcactttatttgaaaaagacctcgtgcggagggttattgtacaggggatttttgtggcggccatgacgaccgctgcttactggacgggtgctgcgaccggcggccatgcggcaggacagacgatggcattttgcacactggcattttcccagatgctgaggtcctttaatgagcgctccaacacggagcccgtctgggtgagggcggagggagcaaacccgtggctgcttgccgcctttgcggtatcggcggctcttatggcgtgtatcctgtttctgccggcgcttagagaagcgttcagacttgtgcccctttctggcatacagtgggctgccgctgccggcttttctgtgatgactgtcgttcaggcagagctggaaaaatggataaagcggcttaaaagatcaagatagaggtatatccgtacgtgcggcaaaagaatgtgcttttgccgcacgtaattctttgcggagacggaccgccataacgatggctgcgccggcggacaggatgtcagctgccggctgcgcgtaaagaatgccgttcagtccccagacggcaggaaagatgagtatgaccggcacaaagcagatcccctggcggcaggcgccgaggagacagccgtcttttgctcttcccattgaaaggaacagagtggaatatacggtatagaaaccaaacactgcaaaggacaggccgcttgccctcaatgcagcggcgcctgttgttatcatgtccaggtctgtattcgtaaacagggccataatgtctccggcgaacagggaagcggtcagaccgaacagaatacagaaaatggtagaccatatgacggatgttctgactgcctgcatgaggcggtcatatttttttgctccgaagctgtatccggcgatcggctgtaaacctttcaggaatccaaataccatgagacttccgacagacatgatcttcgttacaggccccatcgcggccagcgcaaaatccccatattcctttgccgcatgatttatcatagtgatggaaagacttgtgagcacctggaaagcaagtgtgggaattccgatcttcaggatctcggacaaaagttcctttgagaatgagcagttttttatgctgaaactgaacacacttttttttgtaaatatatagagcagatagacaagtgttgagataaactgcgatactgcggtggcagctgccgctccggcgacgccgaggtgaaatccgtagatgagtacagggtccagtattacattgatgacagcgcctgtcattaatacacacatggtcgttctggcggcgccttcgcttgatacgatattgttcatcgtgacattaaatacattaaagatggaggagacgatatagatgcccgtatatgtgacggcataaggcataacgctttttgttgcccccagctgttttaaaaccggttccagaaacaaaataatacataggatgacggtggatccgacgagaatactgctgtacagggcggtgctggcagctttgtccgcggtttccctgtctccgttgccgagcagcctggacaggtaagaggcggctccgttgccgaacagaagtccgaggcctacgacgatctgcccaagcggatacgccacagtgatcgctcccatctggctcgtaccgagtcctccgacaaagtaggcgtcgacaagattgtacagggcgttgatcatcatacctgtcatagtaggaagaccaagcgccagcaatgctctcggcacaggcgcgcttccgagtaattccatctttctgttttgtccgttcatgtaagttctcctttcgcttgacactgattgtttaatatagtagtataaattatagtaaataaaacgcaaggctatactactataaattatagtatttgtcaaatgaaaaaaggaggagattatggcgaccatagatctgatcgtgctcggtatgcttaaaaatgaatcgctgagcgcttatgatattcagaaactggtagagtacagaaatatatcgagatgggtgaagatcagtacaccatctatctataagaaagtaatccagctggaagaaaagggattcattgagagtaatatcgtcaaggcgggaaaaatgccggagaaggccgtctattccctcaccggagccggagaaaaacaatttgaaaaactgatgatggagatttcttcaaaaccgcttcgcatctttctggactttaacgcagtgatcgtaaatctgacagagctcgccccagagaagagggagatatgtctggggcagatcggagaaagcgttaaaacgttaaaagcatatctggaagaaaatatgaagataaaagaaaatataccggatattcccgagacgggaaaagctgtccttaggcagcagatgatactcgttcaggcgatcgaaacatggctggattccctgaagggcagttttgaggaacaatgaccgtccggctgtttcagaggcctgtaaaaaataccccggcgtccttttttgtggaaaccacgtttaacgacatggtccggagggcgtccggggtataaaaagttgtacggtatctgcctggccgcagcttcaggaacctgcctccagatctttcggcagtatgatgttcagcagtacggcgatcaatgttgcgatcactaccggtgatttcccgaatatcatcacaaaccagtccgggaaattctggagcgcctctgttgcctgtgatatacccatgccgagtgcggcggccagtccgacgatggaggtgttccggtaggacatgttttcggatgttataagtttcatcccggtcatggcgatcgacgcaaacacggatacggtcgcgcctccgagcactgcgtacgggatcgtcgtcaggagggatgaaaacttcggtataaatcccgccgcgagcagaagcacggctgcaaggccgaggacacagcggtttacaacttttgtggtggccacgatacccacgttctggctgtaggtggctgtcggcagtcccccggccagtgaacagaggatattggtgatcccgtatccgacgatgccgccctgaagttctccgtccgtcggcatccggtcgagccctccgcttgtcgtggcggagaagtcaccgatcgcctggatggagttgatggcaaacagcaggccgatggcgacgcacgaagagatttcaaactttacgccgaaatgcagcggcatcggcagctggaacgcagaggcctgcgcgatgggagagaagtcgaccattcccatacagagggccgccgcgtacccgcctatgatcccgatcagtatagaggccagcttgaatatccctctgccgaagtggttcagaagcgtcacgatgacgagggtgatcacagctatgatccagttcctgtaggagccgtaatccggacttcccacgccgccggccatatagttgatggcggtcgggtagagggagaggcctatggtgaatacgacggttccggcgatgagcggaggaaagaacctgcggatcctcttaatgttcagccctacgaatactgccacacatccgcccacgatctgggcgccgagtatcgtcggtatatcaaattctgccgcgatcgtctgcatgctcggcaggtaggcaaagctgatccccattatgatcggaagcccggaacctatcgtaaaccaccgcgtgtgtataaacggaaacagctggatcaatgtggatattccggacacgatcaaagccgcctgaatgagaatgacagagtccttctccgacaggccggctacgcctgcgacgatgatcgcaggcgtgacacagccgacgatcatggcaaccacatgctggagggcaagcggcagcgcctgctttatgtccgggacacctttcaggtcaaatatagaagagcgggtccgctctttgtctgtcatatgcgtcccctcctttagtctagggtgatgagcgttccggtcgtaccgttgataccttcctttgctttttcaagaagagtgatgagcgcgcaccgtcccggcctggaggccgcgaagtcgactgcggcctgaactttcggaagcatggagcccggggcaaagtgcccttcttccatatactgacgcatctcggagacagtgactttgtcaagccacttttcatccggctgtccaaagcggatggctgctttttccacagcggtcagaatgatcagaaagtctgcatccagctcttttgccagaaggcagctggcgaagtccttatcgatgaccgcgctggcgccccgcaggtgatttccctgacggatgacggggatcccgccgcctccgcaggcgatcacgagttctccggaatcaaccatggcttttatcgtacatgtctcaataatttccaccggctttggagaggcgaccacacggcggtagccgcggcccgcgtcttccttcattatatagtcatatttcagcgccatttctttcgcctgctcttttgtaacaaatttgccgatcggtttggacgggctgtcgaaggcagggtcgttttcatcgacccgcacctgtgtgatcatggtggcgacggggatgttgtcgatccctctgtccagaagttcttcacgcagggcgttctgaaggtcatatccgatatatgcctggctcatggcaacgcagacagacagcggagtgttcggctgctctttatcttcgtgggtcagggcgagcatggcattgttgaccatgcccacctgggggccgttaccgtgggcgacaacaacttcgcagccttcttcgatcaggtctacaatggcgcgggctgttaccttaacagccgccatctgttccgggagtgtattgccgagcgcgtttccgcccagggcgatcacgaccctttttttctttgtcatagttatgcctccttatcccttacttgagtattctcggggtccccttttcgtcaagctttttcaggatatcggcgggatcggcaaatttggccaggaagatcatggccgctatgatatacggcttaaagctggcttccttatataacggttcccggtaacggtcaaatacacttgcgtccacttcgccttcctcacagctcacgcctgtgatgtctgccggcagacagtggagatacagcgctttgccgtcctttgtcgtcttcataagttcctctgtacatgcccagtctttgtgctgcgcattctgtgagagcagttctttttccagagcatcgatgccggcctggtcgcctttggcatagaggtcggtccgtttttccatggcggcaaagggagcccagctcttcggatatacgatgtccgcgtcttggaaggcttctttcatatcatttgtctttgtgtaggaaccgccggactttctggcattttccgcggcaactgcctctacttcggggaagacttcatagccttccgggtgggcgaggacgacgtccatgccgaagcgggtcatgagaccgatgactccctgcgggacagagagcggttttccgtaggaaggagagtaagcccatgtcatggcgagcttcttgccctttaagttttccacaccgccgaattcgtggataatgtgcagcatatccgccatcacctgcgtcggatggtcgatatcgcactgcagattcacaagcgtcggtttctgggccaggatccctgctttatttccttctgtcaccgcatcggcaacatcgtgcatgtaggcatttccttttccgatgtacatgtcgtcgcggataccgatgacgtccgccataaaggagatcatgttggccgtctcgcggacggtctcgccgtgggcgatctgggatttcccttcgtccaggtcctgtacctccaggccgagcaggttgcaggcggaagcgaaggagaagcgggtgcgggtggaattgtcgcggaacaaagagatgccaaggccgctttcaaatacttttgttgagatgttgtgttcgcgcatgaagcggagcgcgtccgccagtgtgaacacggcctccagctcgtcgtcagtcttctcccacgtgaggaagaagtcaccgttgtacatttctttaaagttcagggaatttaatttatcgatataatcctgtaacgttttcatcatttattacctccggtcatttatggtttatttacagtacacagatgggagagcagcgtataccgctgcgcatcttacaaggtcgtctttccatgtcttttcgttcggggcatgggcctgtgcttccgcgcccggcccgaacccgatacaaggaatgccgttgcggcccatgatggatacgccgtttgtggaaaatgtccatttgtcggtaagaggacggttttttctctctgcttctgtctgcgcattgccgagacggctgctgccataaagtcctttgtatgcttcttccagagctctggtcacttcatggtcctcaggaatgacccaggttgggaaataacattcgatcggatagacacagccggtataggaaggccggtcgtatgtatacatggacacctttacgtcatcgccgtactttttcacgctcgggagcgcgcggatctcatcaaggcagctttcccatgtctcacccgctgtcatgcggcggtccagggagacggcgcaggagtcggcaaccgcgcagcggctcggcgaggtgaagaagatctcagataccgtgactgtgccccgtccgaggaagttggcttccttccactgtgggttgtacgtttcgttcagcatttttacgagtcctttgatctttgtaccgtcactgtcgtcattttcattcagggcgcgcacatcctgcaggatgtcggccatcttatagatggcattgtcgccccgctccggcgcggaaccgtggcatgatacgccctggacatccacgcggatctccatgcggccgcgctgtccccggtagatgccgccgtcggtcggctccgtggatacgacgaatgccgggcggacgttgtcttcattgatgatgtactgccagcagaggccgtcgcagtcctcctcctggaccgtgccggtcacgagcacctggtacttgtcggacagcagcccgagatccttcatgatccttgccccgtacactgccgagacgatgccgccgagctggtcggataccccccggccgccgatttccgtctccgtctcatacccttcatacgggtcgaagtcccagttgtctatatttccgatccccacattatcgatatgggcgtcaaaaccgatcagggtactgcccgaacccatgtagccgagcacattcccctgggggtcgatctcgaccttgtcaaacgcaagctttcgcatttccccggctatgcgctcaatgtgcgccttctcatcgcagctctcgccaggttccctgacgatgtcccgtaaaaatctggtcatgtcggcttcgtaattttttgcagtttctttaattttattaaaatccatgaaagttcctcctttttcataggggtcagacccctcttgcgaaaggggtctgacccctatggcaattttacaacaattctgaaaatggttctttgtctgttccgcacagaccttcccatacgatctcgtggtaacgctccgggtccgtgtctccctcggatgacacgagcagtacgtcggagttgccgtcgagtttgagcgcttcctttaattcactgtattccggccgggtcataagagcggctacgaggcccatgcacacggagccggactcgccggatatgacctggctgtcgccgcgcagcggcgctgcgtaaatgcggcagccgttggcgcttacccagtccgggcaagatacgaaggcgtccgcgtggtttctcaggatatcccaggacacggtgttggcttccccgcaggcgaggccggccatgatggtgagcatgtcgccggtcacgtcgacacagcttccgtcgcctcttacggcggagcggtagaggcagtccgcggctttggcctccacgacgaccatcaccggaggatgctctttaaagcggttggcaaagtaaccgatgactgcgcccgcaagggaaccgacgcctgcctggatgaatatatgtgtcggccgttttacgccgtcttcttccagctgttcggcagcttccgtggcgagtgttccatacccctgcatgatccaggtcggaatctcttcataaccttcccaggccgtgtcctgcaccatgatgccgtattctgtctcctctgcctctttcgcggccttgcgcacacagtcgtcatagttcaggtcttcgatcgtcacggtggcattttctctcgcgatattttccagtctcgtctgcgttgtgccttttggcatgcgcacgacacatttctgtccgagcttgttggccgcccaggcgatgccccgtccgtggttgccgtctgtcgcggtgaagaaggtggcctgcccgaactccctgcgcagtttttcggaggtaagtacactgtagggcacgtcgcttacatctttaccgagctgttttgctatgtatctggcaatggcgtaagagccgccgagcactttgaaggcgttcagcccgaagcggtaagattcgtcctttacgtacagactccgaaggccgagatagtctgccagcccggatagctttgtaagcggtgttacgctgtactgtggaaagctctgatgaaagctgcgtgcttttttcatttcctcttcagacatgctggcaagctgaaggtcatcactttccggcatgttgttcagtgtccattttaattcagtttcacttggtctgctcacggtatcgtaccctccaattccatatttgtttatttgttgatttccacataactgtataaagtatatttggagatgccaaagtatttggccactttatcccctgatttcgtgatgagaaacgcgcctgcatcgttcagaaatctgatggcttttattttctcgtcttttgtcatgagagccgccggcactcctacaagttcgacggattcctcgatgagttcatccagaagttcactgacgtcgtgggtgatctttttcggcgggttcccggccttactgtcttcctcctccggcgggcagctggtgagcgcgtggatgcttccctccagtgccataagattcgtaatgtcgtaattgatggagaggatgtaacgcggtctgcccttgtcgtcattgatgtaaatggtgctgcatttcaggatgcggccgttgtctgtcttgatcagataggccaggtggtcttcaagcggcccgttttgatgcttcaccgcattcaggaccgcggcggacggcccgtcgccaagcctccggcctgtgatgtggccgttttctatatgcacgatggaactgtcaatggaacttttcgtcagatcgtgcacgactacttcacagttttcaccgaactgggcggccatccccgcagctatctgttttaacatttccagtctggaatctgccattttcttctgtgcctcctcatatacttctactgtctccctaaactcatcatagcacagaaaaaagaaaaagcaatacaaaaataaaaaaatatttagcatacaaaaatatttttgtatatagcgttgcaatttatatatattgatgatagaatgaaggaaataaacggaatgtttgtgtaaattatacgaaataattcggttgcatggacttctttgaatgtgaaatatgttcaaacacacaagatgttctgaacatatatgcgtacagaggagaaccgaaaagagatgccgcgcggacgatctgtctccctgtccgggcggcgccgggcaacaggtaaatatatcattgtaaaagtaaaaaaagcgttcagaataccggcaggcgccatgggaacggccgagagttctggaacaagcggtaaagaggaggcgacattatgctcgtaataggcagcggaaagactattacattagacgtgcagaatccttatattgagaatggcgcggttgccatggacgggaaccgtatcgttgccgtcgggccggcggacgatataaggaagagctacccggatgcacagttcattgatgccggaggcaatgttatcatgccggcgttcatcaacacacacgaacacatctacagcgccatggcgagggggcttagcatcaaaggatacagtccgaagggatttctggacattctggacggacagtggtggacgatcgaccgtcatctcacactggaacagacaagatacagcgcggtggacacgatgatatcctgtatcagaaacggagtgacgacgatctttgaccaccatgcaagctacggacatattacagacagtctgtttacgatagcggaggtggcgaaggaattgggcatacgggcctgtctctgctatgaggtgtcagacagggacggacaggacaaggcgagggaggcggtcagggaaaatgcagccttcatccgccatgcgctgaaggatgatacagatatgctggcgggtatgatgggaatgcacgcccagtttaccatttcggatgagacatttgagctggcggcggcgaacaagcctgcggaagccggctaccacatacacgtggccgaggggatcgaggacctgcatgactgtctgaacaagtacgggaaacgtattgtggaccgtctcatggaccatggggtgctcggggaaaagacgctgctcggtcattgtatctatatcaacccgcatgagatggagcttctgaaagagacggacacgatggtcgtacataatccggaatccaatatgggaaatgcctgcggctgtcctccgacgatggagctcgtgcgcagggggatactgaccggtcttggcaccgacggctacacgcacgatatgacagagtcttttaaggtcgcgaatgtgctgcacaagcatcatctgtgtgacccgaacgcggcgtggagcgaggtaccgaagatgctgtttgaaaataatgccgccatagcgaaccgctatttcaaagcgccgctcggcgtcctgagagaaggggcggccgcagatgtgatcatcgttgcttatgatccgccgacccgcctgacaaaggataacatatacggacacatcttatttggcatgacgggccgagatgtggtgacgacagtcggaaacgggcgcattctcatgcaggacagagaagtaaaagtgatcgacgtaaaagaggccatggagaaatgcagagaacagtccgacatattgtggaagagtatcaacgggtgatgtataatgaggaggaaataatatgagtgataagatgacgtgtatgccattttcccagttgatggaatggatacgcgcggaacatgacacgaagggaactgtgttcggagtccaccgtccttataaggctgacgcctcccgttctcttacgatattcggaagaaacctggagaccgtcatcggaccggccgcggggccgaacagccagctggcacagaatatcgcggcgtcctactacgcgggcgcgcggttttttgagctgaagaccgtgcagataatggacggcgacgagctggcggcctgtgtcaataaaccgtgtatcaaggcggacgatgaatgctataactgtgagtggtccacggagctttatgtgccgcaggcgcaggaagagtatataaaggcatggtttcttctgtcgtttatggcaaaggaatatgggcttgggagcatggacggcttccagttcaacatcagtgtgggatatgaccttgcaggcattaaatctccgaagatcgaccattttatagagagcatgaagtatgccggacatacggacaccttccgggaatgcagacagtatctgctggagcatgcagaggagtttgggcggatgacggcagaggacattgaagccatttctcctgatatatgtaattccgccacgatctctacactgcacggatgtccgccgcaggagatcgagagcattgcggactatcttctgaaagaaaagaggatgcacacatttatcaagtgcaatcctacgctgcttggctatgatttcgcgcgcgcgacgctcgataagatgggatatgactatgtggcctttggaaggttccattttgaggatgaccttcagtacgccgacgcagtgccgatgcttaaaaggcttatgaagctgtccgcaagcctcggactggaattcggcgtcaagatcacgaatacctttccggtggatgtcaaggccggagaactgccgagcgaggaaatgtatatgtccggcaagtcgctttatccgctgtcgatctcacttgcggcaaagctttcacaggagttcgcgggaagactcaggatcgcgtattcgggaggcgcggatgcatttaatattgagcgcatcgccggatgcggcgtatggccggtcacggtggcgacgacgatacttaagccgggcggataccagaggcttctgcagatggcggaagttctggatgatatgggaatgaagccgtttgataagacagacacagaggggcttataaagacagcgcaggatgctgtgtgtgacaggcatcacatgaaaccggccaagatgccggtctccagaaagtcttctgagaaagtgccgctgcttgactgttatacggctccgtgtgaggacgcctgtccgatccaccaggaagtgtcgacatatatgagactttccggggaagggagatacgaggaggctatgcaggtcattttaaatgagaatgcactgccgtttattaccgggacgatctgtgcacacgggtgtatgagtcactgcacgagaaatttctatgaatcaccggtacagataagggacacaaagctgctctgtgccgggaaggcgtatgaggcggccctgtcttcgcttgaaccggccaaaagctgcgggagacgggcagctgtagtcgggggaggtccctccggcatggcggcggcgttttatatggccagggcgggcgtacaggtgacgatatatgagaagcgtccggtgctgggcggtattgtcagcagcgtcataccggatttccgcatcgatgacacggtgatcgcaaaagacgtgtcctttcttgaaaagctgggcgtggagataaagtgcaatacgcaggcgccgccggtcagcgagctgaagcgcgcaggttatgactctgttattctggcggtgggggcttataagagaagcagccttaagctggaaggaggaacgccggtcaatgcccttgcgtttctggaagaatttaatgagacgaagggaacaattagaccgggcagaaacgtcgtggtgatcggcggaggaaatacggcgatggatacggcaagagccgcggtgcgctgtccgggtgtagaacatgtatatctcgtataccggaggacaaagcgctatatgccggcggatgaacatgagcttttgcaggctgtagcggacggagtggaattcagggagctgcttgcgcctgcccgcatggaaaaaggtgcgctcatctgcaggaagacgacgcttggcgcaccggatgcttccggccgtgccggtgtgagggagacagaggagacagagaagatcccggcggatatggtcatagctgcagtgggcgagaaggtgcctgctgactattatgaagaaaacggtatctgtgtggatgaaaagggccgcccgaaggtggacagtaacctcgggacgaacgtgccaggcgtgtatgtcatcggagacgggcttaacggtccctcgctcgtagtaaaaggcatggcagacgcaaagactgcggcggaagctgccgcggggaagccggtgtccggacataggagcagtccggctgttaaatctgatgtctatgccagaaaaggcattctggcggagccgtccgataagaaggaagcacagcgctgtctgagctgttccactgtgtgtgagaactgtgtggacgtctgtccgaaccgggccaatatatcggtacacgtgcctgggatggagaaggaacaagtcatccatgtagattatatgtgtaatgaatgcggcaactgcaggagtttctgtccgtatgacagtgctccgtatctggataaatttaccctgtttgcaaaagaagcggacatggaggagagtaaaaacgacggatttgccgtgaatgaccaggcggccggtctgtgccgggtgcgttatctcggccggatgcatacggtaaatgcggcggaggcaaaagaactcccggaagggatcgcgcggcttatagaaacgatacttaaggactatacatatttgatctcattataaacagaaagaaggcaggcagtatgaagcgtttattccggggcggaactgtggttggcccagagagaacggaaaagttggatattcttgtaaagggggaaaagattcttgccatgggcgagaatcttgacttccacggcgcggaggtcattgatgtggagggaaagcttttatttcccggatttatcgacgcccacactcatatggacctggaagtgtcgggtacggtgactgcggacgggtttgatacggggacgaaggcagagctttcagggggcaccacatgcattgtggactttgccacacagaacaagggggagagtcttgcgtatgcactttcccgctggcatgagaaagccggcggcagatcgtcctgtgattatgcgtttcacctcgccatgtcggactggaatgaggaggtgtcggaagaactggcacaggtgacggcgtcggggatccattcctttaagttatatatgacttacgacgccatggtggtggatgacagaacgatatatgaaatattgtcaaggcttaaagagctcggagggatcgcgggagtacactgcgagaacaaagggatcatcgacgcccggacagcggaagtgatgaagaagaaaggaaaccgggaacatgtatcggactatccgggaacacgccctgcggccacggaggcggaagcggtcgggagacttctaaagatagccggatgtgtggatacgccggtcatcgtcgtgcacttaagctccaaagaaggacttgcagaggtgagaagagcaagagagtcggggcagactgtgtatgtggagacatgtccccagtatcttgtcatggatgaaagcaagtatcgcctgcctgacaacgagggcagaaattatatgatagcgccgccgctgcggacaaaggaggaccagcaggaactgtggaaggcgctgcgtgagaatgagatccagacggtgtgcacagatcactgcagctttacaacgagccagaagaagatgggtgagagcgatttttctctcgtgccgtgcggaatgccgggggcggaggagcgcccggcgcttatgtatcatttcggcgtaaggcagggaaggatcacgttagagcagatgtgcgcatatctgtcgtacgggccggcgaggctttaccatctgtatcccaaaaagggggcgctggagccgggatgtgacgcagatatcgtcgtgtgggatcctgaggcagagtggacgttgtccgcagagagccagaagtcggcggcggattactgtccgcttgaaggcacggtgctcaaaggacgcgcggaaaaggtgtatctgcgcggagagctggcggcggaaaatggagcgatcgtaagggaatacggcgggcggtatgtgaccgcacaggaagcagcagacatcggataatgtgaggcatgaatatgatacgaagttacagaagcagcagaccaattgagaatgagagcctgaagtcagcactttcgctggacgggttttctgcgcctatcatttccatcgtgggcgcggggggcaagacgacgatcatccggcagcttgcccgggaatatgaggcagaagggcagccggtcatcgttacgacgacaacgcatatgtggcagccggacgatggcttttatctaagttctccggatctggagcttttgtaccggatgcttaagcataagaggccggtgtgggcagggtatcctgaaccggacggaaagatgagcgcgtttccgacggcatttctggaagcggtcagaatgctggccgtgccggtcatcatagaagcggacggggcgaaagggcagccgcttaaagtacccggagcgcatgagccggctctatggggcaagacgatggtgcttttgggcgtggccggcctggacgctgtgggcggacgtatcagggaggtatgccaccggccggaagaggcagccgcatttctcggaaaggatatggacgacaggctggagtgcgaagacatcgcggcggtcggcctgagtgatatggggatgaagaaaagtatggatccgtttatgaagtttcacattattctgaataaggcagacaacgcagagcgtatccgtatgggagaaagagttgccggtctgtttgcggaaaaaggattttataatgtagtcctcacggcgggacttggaggcacatatgaatgtactgattaaaggagccggcgacctggcgacagggatcgcgtacgaactgttccggcgcgggcacaggatcataatgacggagctgccggtcccgctcacggtgagaaggacggtggccatgtcgagggctgtctgtgaaggcagcgccgtggtggaaggaatgacgggcatactcgtgacagatatagaggaagcacaggcggtgatggacagcgggaagatcgctgtcatcgtggatgaggcggcggatatccggaaggaattctgcccggatgtgctcgttgacgccatcctggccaaaaagaacacgggtacatccagggaggacgccccgcttgtcatagcagccggtcccggatttacagccggcgtggattgtcactgtgtcatagagacgaagcggggacatacgctgggctgtgccatatgggagggcagtgcgctcccgaatacaggcgtgcccggagaggtgggcggctattcgagagagcggctcatacaggcttctgcggacggagtgatggagcaggaagctgagatcggggatgaagtgtcggccggccagatcgtggcagtgaccggagggaaaccggtctatgcaaagatgtccggcatgataagagggatgctgcaaagcaaagcgccggtcaaaaagggaatgaagatcggggatattgacgcccgtcttgaccgccgttattgtgtcacgatctccgacaaggcaagatgcgtcggagcaggggcggtgcgcgcggcagagcagtattatgggacatacgcaatcgtagtgctggcagcaggacaggggctccggtttggcggcggcaagctgcttgcggatgtggaaggcaggcctttgtaccggcatctgttcgatacgctggcagaacttccagatgtgtggaaagtcgttgtcacgggggagaaagccattatggaagatgccgcaaagagggggatggcggtcgttaagaacacgcagccggaaagaggcagttcccgctctatgaagctcgggcttaaagcatgtctcgatacactaccgaatctgagaggcgttctgtttaccgtctgtgatcagccgcggctgactgccggtacctttgtaagacttcttcggacggccgaacagaatccgggacggatcgtgcgcgcgtccgcaggcggccggggcgggaatccggtcgtatgggacgcggcatatgccggggaactcctggcggcaaccggggacaggggcggccggccggtaatggaaaaacatgcggaagaaatcattttagtagagatagaaaaggaagagttgcatgacatagacaggaaagctgaccttactggggaacagtgaggcagtaaggaggtgccgtatgtacacattggtggtcaacggacagacatatgaggtcacgaatgataagagactgatccggttcctgcgggatgatctgcacctgacctccgttaaagacgggtgcagcgaaggcgcctgcgggacatgtaccgtcatcatagacgggaagacgaaccgggcgtgcatcccgcttgtgtcaaaattggaagggaaacagatcgttacagtggaggggctcagtgacagggaaaaggacgtgtacggatatgcgttcgccaaagcgggggcggttcagtgcggcttctgtattcccggaatggtcatgtgcgccaaggcgctcatagatgaacatccggatccttccaggctggaggcagcggcggctataaaaaacaatgtgtgccgctgtacaggatataaaaagatcatagacgctgtcctgctcagtgcaaagctgttcagggaagaggcggatgtgggagaggataaagggatcgccccgacaggcagggccatccagcggatcgatgccaggcagaaggtgcttgggacaggggagtacgtagatgatatgtatctggacggaatgatatatgccagcgcgctccgctcggcgtatccgcgcgccagagtgacagccatacatacaaaggaggcgaaagcgctgccgggcgttgccggcgtgtttacggctgcggatatcccgggaagcgtaaaggtcgggcatctgaaacaggactgggacacgatgataccggtcggaaaagagacgcattatctcggcgacgcggtctgtatcgtggcggcagagacgccggagatcgtggaggaggccaagaagcttgtcagggtggagtacgaggagctgacgccggtgcttgacccgtttgacgccatgagggaagacgctccaaaggtacacagtgacggcaatatccttgcgcacgagcatctcgtgcggggaaacgcggatgaggtgatccaggcctcccgatacaaagtgacaaatcactatgagacaccgtggacggagcatgcgtttctcgaaccggaggcggccgtagccatgccgtttgacggcggggtgttcatttattccacggaccagggaacgtatgatacacagcacgaatgtgccatgatgctcgggatcccccgggaaaaggtcattgtggaaaataagcttgtcggcggaggcttcggcggcaaggaagatgtgacggtgcagcatcacgcggcgcttgtggcctatctgacaggccgtacagtgaaggtgaagcttacgagaaaggaaagtattctcatccatccgaagcggcatccgatgtggatggacgtgacgacggcctgtgatgagaacggatacctgacagccatgaaggcggtcgtcgtatcggacacgggggcatatgcgtcgctcgggggtccggtgctccagagggcgtgcacccacgcggcagggccctataactttcagacggtagatatcgacggcagggctgtgtatacaaataatccgccggccggcgcgtttcgaggttttggtgtgacgcagacgtgctttgcgtcggagatgaatctgaatcagctggcagatatggttggcatcacaccgtgggagatccggtaccggaacgccatacgtccggggcaggtgctgccgaacggccagatagccgatgcgtcaaccgcagtggcggaggcgctggaagcgttgaaggagcggtacgacagggaaccttatgccggaatcgcctgtgccatgaaaaatgcaggcgtcggcgtcggacttccggactggggccggtgccgtctgcttgtgaacgccgggaaggcagagatacacgccggggcgtcctgcatcgggcagggactcggcacagtgctgactcagatcgtctcggagactgccggccttaagctggaagagatctcttacgagcagccgaacacgtccagggcgccggattccggaacgacgtccggttccagacagacgcttgtgaccggcgaggcggcaaggcgggcggcagaaaagctgcgtgcggacctggcagagtacggcctgaaagagctggagggaagagagtatttcggctcgtatctggcaaagacagataagatgggaagcgatattccgcatccggtatcccacgtggcctacggttatgcggcccagctgtgcgcactcaatgaggacggcacggtgaaactgctggcggcggcccacgatgtggggaaggcggtcaatccggtcagtgtggaaggacagatagaaggcggcgtcgtgatggggatggggtttgccctgacagaacagtacgtgctcgagaatggtgagccgaaatcaaagtttggcacccttggtcttttgaaggccgacaaagtgccggaaatagaaccgatcatcatagaaaagccgggagttgaggcggcgtacggggcgatcggcatcggagagatcacatccataccgacggcgccggccatagcgggagcattttataaatggaacggacaatttcagacaaaactgccgctttctggcacgccttatgagaaaaagaaaaagtagtaccggctgacaggcaggtaagtgtacagggacagacgtttccgtccggacaaagtctgtccctgcaaataagcaatcgagttgtttttgaaaacaacttgatgtataatttagctgaatgaagtatgttgtgttcagatgaaatgagaatgaggaggaccacaagttatgaaaaaaagaagcagaatactcggggtacttatggcagcagttcttgcgggcacatttgtgagcggatgcgccggcgccggggatgcggatgagaaggcggatacgaaagaagagaagcaggagacaaagacggacggcaaagaaccggtgacgatcctggcggcagcggcggccagtctggaatattcttatacggacgagcttattcccatgttcgagaagaagtatccttatattaccgtgaagggtacgtacgacagttccggaaagctgcagacgcagatcgaggaggggcttgaggcggacgtattcatgtcagccgccgcaaagcagatgaacgcactggcggaggaagcactggtggacaaggactcggtcgtggatctgctcaagaataagatcgtcctgatcaccgcccgggactctgatctggacctgaaagaatttacagatatcacgaaggcagattcgatcgccatcggcgatccggccagtgttcctgtgggccagtattctgaagagtcactgacgagcctcggcatctgggatgaagtgtccgcaaaggcaagtcttggcacaaatgtgacggaggtactgaactgggtggcggaaggaagcgcccaggcagggatcgtatatgccacagatgcggcgaccacggacaaggtaaaagtagtggcggaggcgccaaaagacagtctggcggaaccggccgtctatccggcaggtattgtctccgcctcttcgcacaaggaggaggcccggctgttcctggatttccttaaaagcgacgaggccatcgctgtatttgaaaagtatggatttacagataacaatgcagactaaggaaagtacatctcataaaagaccacaggacagaaggaggatgacatggatatagcccctgtaatgatctctcttaaaacagcagttttctccattgtgtttacattttttgccgggattctggccgcatatctcgtagtgcgcatccaaaacgagaaggtgaaaatggtgtgggacggtcttttaacgcttccgctcgttcttcccccgacggttgcaggcttttttctgttgtatatatttggggtgaaacggccggtgggcagtttctttgtggagtatttcggcgtgaagatcgctttttcctggggcgcgacggtactcgcggcggcggtgatctcttttccgcttatgtaccgttccgccagaggagcgttcgagcaggtggatgagaatcttatttatgccggaaggacactgggcatgtcagaggcttttattttccgcagagtgcttctgcccaatgcgctcccgggggtgctctccggcggaatacttgcctttgccagagggcttggcgaattcggagccacggccatgatcgcgggcaatatcgcgggcaggacgcggacgcttccgctggccgtctattctgaggtggcggcgggaaatatggaaggcgcttacaaatatgtgctcatactcgtgctcatttcgttccttgcagtatctggaatgaacgtggcggcggggatgttcagaaagcagggccggaggagatgatgggacagatatatgcacgtattcacaaagaatataagaatttcagactgaacatggaactttccgtgccgggacaggtactcggtgtcctcggagcatcgggatgcggcaagagtatgacgctgaaagccatagcgggtattatcactccagataaaggaaaggctgccgtcggcgaaaggattgtttatgacagtgacaggaagatcgatctgccgccacagagacgcaaggtcggatatttgtttcaaaactatgcgctttttccgaatatgacagtgtatgagaatatagcggctgcggcggggaaggacaaggcccttgtcaagagtctcatccgccggtttcatctggaggagacgcaggggctctatccggacaggctgtcagggggacagcagcagaggacggctcttgcaagaattcttgcatccaggccggaggcgctgctgctggacgagccgttttctgcgctggacagctatatgaaggaagagcttcagatggaactaaaagagcgtctccaggagtttggcgggccggtcatgatcgtaagccatgaccgggatgaactgtacagactctgtgaccatattatggtcatgtccgcaggtgaaaatcttatttgcaaagggacgaaagagttgtttgaggatcctgagaaaatggaggccgccaggcttaccggctgtaagaatatcacgcctgcggtccgcgccggtgagcgggaagtggaggccaaggagtggggcgtgcggtttacgctgaacaggaagattccggaacggcttaagtatatcggcatccgggcgcatgatttccggccggccggggcggacggccagatacgtgtagaggcggtgagcgtgacggacgcgccgtttgaacggaatgtattatttaaaaatgcggactgtccgcgcggtatgatgtggatgaagctggatggaagggacgggcagatcccggagcgggtcagtgtgcgggaagacaaaattttattgttggagtgatgggtatgcttcacgtggaagtgaaaattaaaatatgcgggaaggagcaggtgttcggtcccgggatcgcgcagcttttaacaaatgtcaggaagtccggttctgtgaaagaggcctgcgggcggatgggcatgtcgtacagcaaagggtggaagatcgtcaaccgggcggagaaagagcttgggatcaggctcatagaacggcagcacggcgggaaaagcggagggagctgccaggtgacggagcagggcttaaagatgctggaacggtttgagagtatggaaaaagagctggaagggaccgccgcagaaatgttccgaacgtattttccggaatatgaagcggagcgccgcacagaaccagaaactttgtaaagtttctgctttttatagatttcactcttcgtctggagtataatggattcaatattataaacaacaaacatgtataaacgaggaggaaactataatatgtggaacagagtggaactaaagatgcggggaaagcaggcgtttcaatataattactggccgtgtgtcggggcggcgttcattatgtcggtcatatccatggtattcaattccggcggggcaggacggagcacgcagactctgaggcagacaacgtattaccatgacagtacggacttgtggaacggatcatcctatgcggatactttttccgggggactgcctgcgcttggagcgttattcggagctgtcgcagtcatgatggcgctgtttggcacgctgctgatgatattcgtgggaaatgtgctggaagtcggaggaaaacggttttttgtccgcaaccagacagagcgtgtgagcgtaggtacggtactggacggtttccggtcgggacattacggcaatatcgtgctcacaatgtttttgagggatctgtttacatttctctggtcattgcttttcatcataccgggcattgtaaagtcatatgaataccggatgatcccgtatattctctctgagaatccgggcatgagttataaagaggcgttcgccatcagcaagcggatgatgacaggacagaagctggagacatttatcatggacctgtcttttatcggctggtatctgctcggcgggatcacctgtggtatcgtgaacattttttatgttatgccttatgtggaggcgtcgtttgcggagatgtattcctttaaccgtgcaaaagcttatggagaaggttatatcagataattcgatcataaattcatttacgtaagggggcagcgttatggaactgaaagaataccggcggtgcgccgatgtggccagacatcatgagaaagcagagcttgtgctgaagaacgcaaatgtggtgaatgtatttaccggagagatcctgtccgccgacgtggcggtctcggacgggaagatcgcgggtatcggaacttatgagggagaaaaagaggaagaccttggcgggaagtatctctgccccggttttatagacagtcatcttcatctggaatctacgctcgttaccccggcggagttgatcgtccaggcggccaaatgcgggacgacgacgtttatcgtagacccgcacgagtcggccaatgtggccggggaggcggggatcggctatatcctggaacagacggaagacgtgcctgcgaatgtgtacgttatgatgccgtcctgcgtgccggccaccgctgtggatgataatgggtgtgagtttacggccgacaggatgaggccgtatctcggacatccgagagtgctcgggcttggcgaggttatggactatgtatctgtcgtgggcggagacgcccgcatgcatgaaaagcttgggttatttgaaggcaggacgctggacggtcatgcccccgggctttcggacgatgacatccaggcttatgccatggccggcatcggcacggatcatgagtgcattgattttgagtatgcgctgaaggagcgccgctgcggtatgacgatactcatacgggagggcagcgcggccagaaatctggacgccattgtaaaagggatcgtggagcacggaaccggtacggagggattctgcttctgcacagacgacaaacatattgaagatatacaaagagacggacatatcaactataatgtcaggaaagcggcttcccttggaattcctgttatccatgccatacagatggccaccatcaacgcggcaaggtgttacggcctgcggcacctcggcgccattgcgcccggatatcaggcggatatgatcgtgttcgacgatctggagaagatgaacgttctggacgtgtaccacaggggagtgaaggtggcacgaaatggaagcggcggggtcagagcctgcccggaagagctgaagcatacggtgcgtctggaacatttttcccgggaaagcctgaggcttctgaaaccggacggaccgtaccatgtgatccagatgcaggaaggccagatagtcacgaaagatatcgtatgtgagattccggggaaaaaagagtttacagcggacagagaatataataaaattgcagttgtggagcgtcataagggaaccggaaagacgggcgtcgcagttgtgtccgggttcaatctgagcggcggggcggtggcatccagcgtgtcccacgattcccataatatcatcgtcatcggtgacaatgatgcggatatggagctggcggtaaatgaacttatacgcacccagggcggctacaccgttgtagaaaacggcaaggtatatgagacgctggagctgcccattatgggactgatgagtgacgcagggtatgaaaacgtagataaattattaaaaaaaatgataagaaaggcacacgagatgggagtgccggaaaccatggagccgttcatcacactgtcgttcatggcacttcccgttatcccggaacttcgcattacaccgagaggacttttcaatgtaaaagagttcaaattgtgtgaataaattcaaaggggtcagacccctgtgcatacagggggtctgacccctttgaaaaatgaggaaattgtatgacaataaacaaatcaatgagaagggtcctgaaggcgctgtcttttgacggcattgaggtggaggcatcgaggaatctggccaatctgaaggcgatcgatccgatgaagatatttcacaagacgatcgactataagatatataacggcgaatatgagataccggtgaggatctatctgccgaaagagaaggtggtggacggacttcctgtacttctgtttttccacggcggcggatgggtgacggagagcatagacaattatgagcgtatctgtgcgagaatggctgccgacacagatcacatcgttgtgtcggtggattaccggctggcgcctgagtacagattcccgaccggactggaagactgttatgcagtcgcggaggctatatttacgaagcggttcatcctgaacgtggatccggaacagatcaccataatcggtgacagcgccggagggaatctggcggcggcggtatcgctcatggccagagacaggggcgtgtttctcccgaagaagcagatcctcatataccctgcggtcaactgggattacagtgaagcttcgccgtttgcctccgtcagggaaaatgggtcggactatctgcttactgcgggaaaaatgcgggattatatagaactttacctgtcctgtgaggacgataagaagaataaatattttgcccctttgatggagactgattacagtgatcagccgaaaacgcttgtgctgactgccgagtatgatccgctccgggatgagggtgaggaatatgggcaccgtctgagaaaggcggggaacgaagttgaaatacaccggataaaggacgccctgcatggttattttgctctggggataaaatattaccatgtacaggagagttttgaactgatcaataattttttaagggaggactaacgaggtgttccagcagaagagggcatactggagaaatctggacaatgccgcgaaacttttttcagccacaagcagcgccagggatacgagagtattccggttttactgtgtactaaaagaaaatattgacagggatattctgcaggaagctttaaaccggacgattaaaaagtatccggtctttctgtcggtcatgagaaagggactgttctggcattatctggagagaagcgagctgcgcccggaagtaagggaagagtataaggaaccgtgcagttgtctgtacgtgcgcgataagaaggcgcttctttttgaagtgacatattttgaaaagcgtatcaactttgaagtgttccatgcactgacggacggaacgggagcgacggaattcctaaaagagctcgtggggaactatctcagtctggcgcacggaggggaaaggccggctgctgcggactttaaagaagccggtcctacggtgcaggatcaggaaaatgacagctttttgaaatattattctccggatgcaaagcgtaagaaaaagaaaaagatccgtgcctatcagattaaaatgatgaagaaagagtacggtgaactgcaggtgacggaaggaactgtctctgtccgggagcttcttgcggtatcgcgcgaaaaaggcgtgtccatgacggtactgatgaccgccgcgctcatgtgcgcgatccatgaggaaatgacgaagatccaggagaagaaaccggtcgtacttatggtgcccgtgaatctgcggaagttttttccgtcggaatccatgctcaacttcttcggctggatagagccgggccaccgtttcggtgaagggagggacagctttgatgaaatacttaatgaggtaaaaaaatatttcagcgactatctcacgaaggaacatatcgccgggcacatgaatgagcttatcgcgtttgaaaagcacaaggtgctgaaatgggcgccgctggagatcaagaaccgctgcatcagggcaggggcaaagctggcggaaaaagaagttaccgctgtgttttccaacatgagcgcggtaaaaatgcctgcggagtatgaaccttatatcgaaaggttcggtgtgttcacaagtacgccaaaggtggaattatgcgtctgttcgtacaacgatacgctgactttcggtttcacatcccgttacgacagctcaaatatccagagaaattttttccgtattctgtcggagctcggggcggacacgaaagtggaagcgcctgtatatccgcaggaggttaagccgaattatgagggaaagaaattttttaaatatttttccttctgctgcatcgccgcgatcgtggtcggcgttatgctgaatgctatcatatcgcccgaacggcgatgggcagtgtttgtggcggcgggcgcattcagtatgtggctcgcgctggccatcggatttttcaaacggaataatctgctgaaaaatgccatgtggcagctgctcgtcgtcagcatcggatgtatcatatgggatgcgtttaccggctggcataaatggtccgtgaactttgtcctgcctgccgtctgtgtcataatagagctgtccatgcttattatctcaaagcttcagtcacatacggcaagggaatatatgatctattacgtaatggcatccgcgtacagtattcttgttccgttcacactgcttctgacgaaggtgataacagtgacaactccggccgtgctctgcgccgggctgagttttctgttcctgcttgcgctcatcatattcaaagcgcgggaattcaaagaagaaatgcagaaaaaatttcatgtatagagcgtggcaggcccggcatactaaccatgaggtgatgtcacaatgatagataacagtgaacttccaatcggttttacgatggagctggcgatgcactcagatatcctgagtgaatttgcgtccatgccaaaggcaaagcaggacgagatcgtggaaggcgccagaaaggtaaaaagccgggaagagatgagaagctatgtggaaaatatagcggtcttctaaaaagggacaggttaaaacgaaattggggacgggggaaaattaattttcccccgtccccaatttcgttttaacctgtcccctttggatgtcatattgacagttccctcggttcaatgcctttgtaggcaatggaataatcgcagcggtaagtgagccggagtctgacgttgtactccaggatagaatccctggcgtaggtgatgcggtctatccgaagggccggagtcccggcagctacattcaggcaggaggcgtcttctgttgtgagagccactgccgtaaatgtttcgcttacccggttgagagcgcccctcatcttggcatcgatggaatacacatgggcagcctggttctcggcaaactttgcgcgttcgtcttctgtgagagaggcggtgggtacataagtgcagtctactgcgacaggagtgtcgttggaaagccgcactcttttcacataataaagctcatcattttccgtgatcctcagctgttccatgatctgcgccgcttccggaagatcttttacaagcgtaaaggtctgggtaatatattcggatcttggcctcatgccccagtgtacggtttcttctgccaaactgtaatacttctttgtatgcatttcaagcgcgtaataattcacaaagcttcctcgtccgggtatccgctttatatacccttcattcgccaggttgttgagtgttctcctggctgttattctgcttacattatagtgttcgcagatttctgactctgacatgatcctgtccccttcttttaattccccgagacgaatctttgatttcaagtcttcctgaattataaaatacagagattctgttgcctttttcttagccataatcctaaccttccttacatactctgtgatccttacattgatgtctgaccttatatgagatgtttaattataacatcttaagtaaaatatatacaaggaattgttaaatgtcaatagtaaaattaaaaacatattgacataaatggtatataaacatataatagctttaaaagttatgtatatatatgacaaatagaaagagagtgaggaacatatgcagagattaaaaaatggcagcagatatatggctcttgcaggcgggatcattgtacagatctttgtgggcatcatctatatatggagtattttccaggaaccggtgatcgaatatttcaactggacacattcaggggcggcgcttaccttctctgttatgctcccgatgaatgttctcggcgttacagcaggaggaatactgaacgacagaaaaggggcccgctttgtccttcatacaggaggtatccttatgacggccgggcttctgttgtcatcgctgatcccaaaaggacagccgtggcttctgtatatcttctatgcggggatgggaggatttggcggcggtctggcctacaatgccactgtgtcctgtgcccagaagtggtggctggataggaagggactggcaggcgggatcattgtctgcgcctatggaatgtccacggtcgtgtttacgcctgtggtcaatatgctgcttggggagaacggcgtgggggtaaaaaatacgttccgtatcctggcggcagtatttgctgtgatcgttctcacagtcggctggtttgttgtcaatccggacgaagaatatatggataactgtgtaaaagacagtaaagaatggataggaaagaaacagtataagcccggcgacgtactgaggtcagggaagtattatatggtccttatctgcctgttgtgtctgacgccggcgtatctgatgctgaatccgatgataaaatcattgggggaattaagagggctttcagaggaaattgcagtcataagcgttatgataaccggtctggcgtctgcgctcggaaggctgacggccgcctggctgtcagataagatagggtgtaaaagagtgctcttaatgctgtacacaattacttttgtcagtattttacttctctggaatatacacggaaatatgtttatcgtgctgatagctctcataacatatgcgtacggaggatgtgcgggagtgactcctgttcttgccacagattttttcggcacaaagtatatgagttctaatttcggcctggtcatgatctcggtcatgatttcagggatcacatatcccactctgggcacggcagtcagcccggcggggatccctgcggcgcaggtctttctcatacctgcagtattatgcgtggccggcttcgtcacattacactttttgtacggtaaagactgacagaaaataaagagaaattgaattttctgaaaatataagttgacaaattaaatggtatatattaatataacgttataaaaatatataacagataatctgtatataactgacgtcagaagaaagttccagtaaacaaattcaatgtaaggaggaaaaattatgggaagggttgacggaaaaacagcagtcataacaggaggaggctccggatttggacaggcatcggtgctgaccttcgcaggagaaggggcaaacgtagtcgtagttgatatcagtgaagccaatggcacgcaggtgacagaaaaggtaaaggcttccggcggcgaggcagtcttcgtaaaggcagacgtgacatcagagaaagactgggaaaatgttagggacactgcgctgaaaacttacgggcagatagatatactttttaacaacgcgggtatatgtctgatgccggaaaatgcggatatcgcacatgtcgacatgagcatatttgacagaactatggacataaatgtcagaggcgtctggcttggtgtaagaactatggcggaagagctggtcaaatcaaaagggtacatagtgaatacagcctctgtagccgcatttaaaggtcctctcggggcggctgcttatgccacatcaaaaggggcagttgtggctatgacatacgcgatcgccaatgaattaggactctggggtgtgcgttgcaactgcatctcaccgtatgccgctgacactccgatcggagccaatgtacctgttgagatggtcagaaaggccaggaccggtaatccgctttatacaacgatcgacccgtatgatgtggcaaaaacggcattgtttttgacatcaggggaatgcagatgtatcaacggttccaattattttgttgatgcgggcgctgtgaccatgactcagccttgcagtataaaagattttgtcgacgcaaatgcgaagtattatgaaggcgcagagtgtacacatacatttgaatgatgtgcagagaggtgagatgaatgggatgtaaatttgaacatatcggtatattagttaaaaacagggaacttgccgttacatcgcttcagcagatgccgggcgcagatgaagcggtgtatgtggataaaatgaattttgatgagacgtgtgtacaggttggagctccatttgcaataaaaggagcaaatataacggtcggcggcgttgagtatgaaatcattgaagttgtcccggaggaaagcagaggctcgtacatgatgaaccgattggcagaatacggagagggactgcatcatattgcatttgaatatgatgaccttgaggaattcaacgaagcggcagaatcactgatccggcagggatatattgtcggacataaagcgagcattccttttatgggaaagacggctcacgtctattatctcgactgtccgtttggcgggcttacctatgagatcaaatgtatggtttagaaagagaggaaaaattatatgaaaaagcggatactgagcagcgtattgatgatagctttgatgacgactcttatactgggcggatgcgggacaaagtccggggataaaaaagaggataatgctaaagataaaaaacggacgatcgcatgtatcgtagggaaccagacgatggatttctttgtcaacatctctaagggggcgcaggacgcagccggtgagggagacgaagtgctggtctactcgtttgacgatgatgcaaataagcagagccagatctttgaagactgtatcacaaaaaaggtggatgccatcctgacgaccatactggacagcgaggctatcataacgtcgcttcggaaggcggaacaggcgggtattccggtgatcacaatggatgcatacccggacggtaaaggagtggaggatctttatgccgccgctgtactggatgatttatatcaggcaggccacgaccatggtgtggcgttgtgtgaagcgatcggaggaaaaggcaaaatcggctgggtatggtacaccggagcaagtgaagtggcaaagcagagatgtgaaggctttaaagacgcggtggccgaatatccggatgtagagatcgttgcgtacagcgaaggcagcgttgatacagaatcatgcctgagtcagatcagcgcgcagctgcagaattacagtgatctggacgcatactgggcgccgtgggcgaatgcgggcatggcagcggtcacagctcttgcctcggccggaatgtcagatgtcaggctggctatcagtgactgcaacgaagaccttgtaaaatatgttcttgacgggaaggtgatcgcgctgatggacctgaacgcaaggggaatcggcgagaaggcaatggaactggcctgcgaatatctggacaaagggaaagtcagcgaacagatcaattacgtagaagtgatcaatgtagatgaatccaatattgcagattatcagtaatccatgtatcagtcatagataaagagtgaaaagaggcggcctgcttaattgtcggataacggagcgatcaaatagacaatatgcaggccgccgccaattgaggatgaacgtatgaataatgaaaaaacagttttaaagatggaacatatagtaaaatccttttacggcgtcaatgtgttaaaagatgtgagtctgtatttaaaagaaggggagatccaggcacttatgggagaaaacggcgcggggaaatctacgcttatgaaaatattaggaggcatctattcaaaggacagcggtaagataacagtgaatgggaaagaagttgagataaagactccgctcgctgccagagaactgcacatatgtctcgtacatcaggagatttctcttgttcctcagctaagcattgcggataatatttttctcggctcggaactgaagcggggactgctggaggataaaaaggcaatgagggaaaaggccagggaggcgatagagactctggaactgaggattcctgtcaccacaaaagtgtacaagctgagcgtagcgcagcagcaactggtggagatcgccaaagcgctcgtatttgatgcgaagatcatagtgctcgatgaacctacggctgccatatccgaaaaagaggcggaaagcttattcgtatatttgaagaaattaaaagaaaaaggaatatcgatcatttacatatcccaccgcatggaagaaatatttcggatatgcgattccataaccattatgcgggacgggcttgttgtgtcaaataaaagggcagaggaaacagataaaagtgaggtcatatcggcgatggtcggaaggagtataacagacttttttggcgataaccatccgcaggggacagaggatatattggaggtgaaaggattaaataacagatatttaaagaatgtaagctttaccctgaaaaaaggcgagatcctggggtttgccggtctggtcggagcggggcggacagaacttgcgagggcaatatttggtcttgataaggcagacagcggcgaaatatttctgaatgggaagaagatcaattgcagtaaaccgtatgaggccatgaaatgtggaatagggctgataccggaagacagaaagcagtcaggactttttttggagaagtcgatctcatataatctgacgcttcttgttttaagaaaattcattaaaggaatatttgtgaatgataaaaagagaaatgagattatcagagagtattcagaaaagctgtccataaaaatggccggcgttgaacagcattgcgcacagttgtccggcggcaatcaacagaaagtggttatatcaaagtggcttgcatatggcccaaaggtgctgatcatggatgaaccgacaagaggagtcgatgtcggtgcaaaagcagaaatatatcatttgataaacgatctggccaatgaaggatattccataatcatgatctcatcagaacttccggaaatcatcaatatgagcagccggatcgtcgtgatgcacgaaggaagaattacaggtatcctcgacggaaaagaaacagagtttgtgcaggaagagatcatgaattacgcaattggaggtaaagttgatgaaaagtacgaaaacgaaaaatgaaaacagactgactataatgctcaaagattttataaaaacgaacggcggtatccttatcgctctggcggcaatgtttcttttcttatcttttgcaaaccaatactttttcacttctaataatatggccaacctttttaattattttactacgaattgtgtgctggctatgtgtatgatgtgtgtgctcatcacaggggagatcgatctgtctatcagttctttcgtagctttgagcggtattgtgctctgtgttttcctgaaccggggaatgtcttttggcatatctttactgctgaccatattgatcggtgccctggtggggatcctgacaggcacggtcatagcattttcaggaatgccgtcttttatcgttacattggcgatgcagggtgtgatcagaggttccgcatacataatcagcgccggggagaggatctcatcggcggatgaatggctttttaatctgactagtaaaagatatcttggtgttcccctcccgactattatcatactcgtcattgcggttctgcttggactcctattgtaccggacttcctttgggaagcatatgtacgccgccggcggcaaccgggaggccgccatctattccggaatcaatgtaaagaagatcgtgatcgtcacgtttgccatatcgggcgcattggcctgtctcgcaggctcctttgttgcttcccgggtgacatcggggcagccgtccgcaggagcgggatatgaaggagacgcggttgccgcggcagtattgggcggcacggcatttaccggggggagagggactgtttccggcgtcataatcggagcgctggtgatcggtacactgacaaacggaatgaatctgctggagatcaacgcttattggcagcagatatgcaaagggctgatcattatgctggcagttatgatagacactgtaaaacaaagacgcagtaattaattggaggaggaaatgacatgacagaccatttaaaaaacagagcggcacagcacaaatttattttaggagtgagtgcggggataccgctgactgctaaaatagcgcatgatgcgggagctgactttatcgttacacataaagaggagatatttggcgccgacggcagaatgccggtaatagccaggacaggttatggcggcaactgcaatgagatcataatggagcaggctgacagatatgtgtcagcggcggggaatacgcccgtctttgcaggcataggtccggcagaaccatatacaaatgtagatcgttttacagaaaagctcatggaaaagggagttaccggcattacaaactatcctacggcagggggatgggtcggctcctatggaaacggcatacagatggcgggagtcggctattccctggaagtagattatctcagaagatggggcagaaaaggtgttcccgccatcggatattgctttaatacggagcagataaaacagatgacagatgcaggtgtagaaatattgagtctttatattccgagaactgaaaaagaaacacacgggtgggacgatgccccttcggcggaaaaagcggcggaggcggcggcagaattagttgagacagccagaagagagaataaaaacagtgtcatattgtgcagcggaggtacgatccgtcggatctcagatatacataattaccttaagagcgccgcggctgacgggtatatctgtgatgagtcagtagaatgtgcggcgatagacagagcggtttcggagacggtaggcggatacagaagactggagacgtgcctgcggcgtgaaggaggacagagatgaaaagatattcaagagaagaaatcatggatcatttacagcaaagaataaaaaaccgggagccgataatagcctgcggcgccggtacaggactatacgccagggcggcagaacgggaaaatgcagacttcattctggcgggggcaagatccaacgcactcgtaaatggtctggccgcagaagagtgtgtatttccttttcacgatgtaaatgaggtatcctgtgaacttgcaaaacatctgcttcctgtgataaacagaactcctgtgatagcgggggttggggcttacaatccatatctggacgctgggcggctcatacgtaatataaaaaaacttggatacagcggtgtgatcaacagtccgggcagcggcgcgtacgcagtccagcttaagcagaactgctttcagaaggaaatagagctgatcgttaaggcaagggaagaaaatgttttttccatggcggtggtgagaacgccaaaagatattgcatgtatgtgcgaggcaggagcggatgtgatcgtaattcaatgtcaggaaacggcagaggactgtgaagaatatataagttaccagagccggcttgccagaagcgcatatgaactcagtaaagaactcattgtacttgcggatattggtaatctgacaaatgagaaagaaatacagaggctgttaacggagacgaaggcggcaggaatcgtcagcgaggaggcggtggagagtctggcagtgcagaaagaaatgtcaaaagtgctgagggaaatcatgaatgttcagtagaaagtgaggaaaatgtggatgggaagtaaatttaccagacaggaagtcttagacagattaaatcgaaagagagcagagaaaaaaccgataatcatcggggcgggaggcgttgggctgatcgccaaagccgcggataaagcaggaatagacattataatgtcatactgtacaggacccgtcaggatgaacggcaatgcggggcagctggggtatatgcagtatgtcgactgtaacgggatctctcttgagatgggacacaagataatcggccgtgtaaaagacactccgatggtggcagggatcggagtgggcgatccatacagggatatagacgatctcatcgatgaactgaccggcatcggatattccgggatcacaaacgttccgacactgggaggtcattccggcgcgctgcgcaagagcatggagagggaaggaatcggatttaacggtgaggtaaagcttatacagaaatgccgcggtaaaaatatatttacgatcgcttatgcatttgacgaagagcaggtaaaagctatggtccaggccgggacggacattatatgtccccacgtaggcgtcacacgtgataaagcatttgatttcaatgtacttacagtagagcaggcggcggaaaagatcaatcgtctctatgacgtggctgtaaaagaaaaccgtgatgtgatcgtggcatgccatggcgggccatttgcagatccggagtcggtgcagaaaggcttcagactcacaaaagcggatgctttcgtaggggcgtccacagtggagaggataccgacggaggaagcgatctatgaggttgtaaaagaatttagttcactgacgcttgggaaatagcagagaggattgcggatggagacaatagcagtgatcggagcttttgatacgaagggaacggaatttgaatatctgcggaaaaaaatagaagaatatggcgccggcactcttatgatagatgtcggagtgctgggggagcctgagttttgcccggatgttgcggcggaggaagtggcttatttatccggggagaacctggaaagtctcagaagacagaggaaccggaaaaaggctaatgatgctatgatacgcggtataaaggtcctgattaaaaagctgtataaagaaaataggattcagggtgcggtctctatgggaggcggtcaggggacacatgtggctgccgccgcaatgtctgttctgccggccgggtttccgaaagtgattctctcgaccgtggcaaccgtgccgcacgcacagtctcattttgaaaatataaacgatacgatggtaatgaattctcttgtggatatacaagggctcaattaccttttgcggactgtcatccgggaaacggcggcagccattgccgggctggccagacatgcagaagaaccttgtaagacagaaaaagaaaaacgtattgccatgtccatgttcgggataacgacgccgtgcgtaagccgaatacaaaaaaggctggaaaagagcggctgcgaagtccttgtatttcacacgacgggaatgggcggccggctgatggaaaagacgatccaggaaggccatatcgacggagtcgtcgacgtgacgcttggggagataacatcggatgtcttcggactcccgggcggagcgggcaaagaacggctctgcgccgcgggaaaaaagggaattccacaaattgtgattccgggcgctatggatgtgctgaattttatgccccccgaatccatgccccaggcatataaagaccgcaaatatctgatgcataatggggacttgaaagtggtgaggacgaatgcggaagaaaacaagatcctgggggaagagacagccagaagactgaacagttcatccgggaaaacagcggttgtttttccgctcagagggctgtcttccaatgatcaggaaggaaaagagttttattcaccggaagccgaccgggagttatttgatgccattagaacaaatctgaagccgggaataagagtcatagagttggactgtcacataaatgatcctgaatttgccgactttatcgctgattttatggtggaggaaatgctatgaaacaaatggaaaggaaagagatcctgaagcggctcactctaaaaataaaggccgggaaaccggtcatcgccggaggcgcaggcctcggcatcgtcgccaaaatgcaggaagcggccggaatagacatgatcatggcgtacaatacaggcccttaccgtatggatggtgtaccgtcctttgtcggtcatatgccgtacgggaactgcaaccgtgtaaccttagatctggttgatatactggcgaaccgtctgacagacactcctgtcatcgccggggcaggcgcaggcgatccgtttctggatataccgtatcatattgaaacgctgtgccgccgcggagcgtccggaataacaaacgtgccctccgtgggagggaagaaagcaggagcgcttaagggacctgtgagggacgatatggaatggaacggattcggatttaaaagagaagccgagatgatccggtactgcagaaaaagagacattttcagtgttgcttatgcatttgacgaagagcaggtgagaacgcttgtacaggcagggacagatattatagcgcctcatgtcggcgggacggcaggaggcatgaccggatttgaagccgtatccgtcgaggaggcggcagataagatccaacgcatgtatatggcggcggtgcaggagaatccggatattatcgttttatgccatgggggtccgctcaaagacgcaaaaacagtggaagagtgtatgaaacttacagacatacacggatttatcggagcgtcggcgctggaaagaatacctgttgaaaatgaactgactaagatcgtcagcgcatttaaagcgacacatctgcggtgaggaggacatatatgagacagtatgcaagagaggaacttatacagtcatttcaaagtaagatcagaaagaaggaaccggtcatagcaagcggagcaggagcggggatcgttgcatcggccggtgaaaaggccggcctggatctgctcatcatatatagcacaggactgttccgtcaggccggagcaccgcttctgactacgatgctgccctacggcaactgtaatgatatcgtttctgcacttggcaaaaaagtgattttccggaccgtggacatacctgttatcggggcgatcggggcggcggacccattcaaaagctgggatctgatcattgacggactgcaggagacagggttctccggcatgatcaattatccagtgtttacaggaatcgacggttttgccgatgatttggaggattccggaattggattttcgaaaaatgtaaacttgatacgaaaatgcagagagcgggatttcttcagcgcctcgtttgcttttgaggaagctcaggctgaaatgctggcggcggcaggggcggacatgatttgtgccatggttggagggactgcggggggaacaaatgcgattaaagaaaataaagtgcgctccatggaggaaagctgcaggatcatacagaacatttatgaggctgccacatcagtaaatccggatattatcgtcacatgccgcggcggtccgatcgtagagccgaaggatctgcagtgctgcttcgataatacggatgtacaggggtttatcgggggctccagtatcgaacggatcccggtggagcgcgcggtctttcatgcaacagaagaatttcttggcattaacgcataagttgggaggacgtggatgggaaagcgaagaatggatataagaaggaggatgtctgagagaataaaaaggcatcgtcctgtacagggcgtctgtgtgagctgcggcctgacagccagggcagctgaaaaagagggagcagactttctcgttacatatgccggggcgatgttccggcgcgaaggggtgccggccagtctctgtgagctgtgctatgacgactgcaatacagtgacggaagagctgggaagccacatactgcctcgtttaaaagatattccgcttatcggaggcatcgggtgtctggatccttacagagacgttgtacagtttatcgatcatcttattgcgaaaggattttcaggcgtggcaaatcttccgagtataggggactgggaaggcgattaccggacaatgcccgaacagcttcatatgggatatgaaaaagagatcgagctgataagaacgtgccgcgggcgggatatcttcacccttgccaactgctatacagaagaacaggcagtaaaaatgaccgaggccggagcggatatgatctgcatagatatgggagctacacagggaggtcttttacagtcgtcctgtattgtgacttgtgcagaggctgctgaaaagatcagtaaaattgcagatcgtgtacatgcgtgcggggaatctccgtttatcctatttcacgggggaccctttgcagaaccggcggatatgaacgtgtgtctgcaaggcggcgcggtccacggtgtattaaatggttcggcagcagagcggataccagttgaaagagcagtgatggatacagttgcgcaggtcggcgcgctgcgtctttgaatctgaaaatggaaaggaagcgtaacacatgaagacggttgcagttatcggtgcactcgacacgaagagtgatgaatttctatacttaaagacaaggatcgaacagaaagacgtccgtaccatcatggttgacaccggcattctcggaagccccaaattccgcccggacataagcgcggcaatggtggcccgtgaggcaggggaggacctggaggagatgcgccgggagcagtcccggcagaagtccaacgacactatgctgagaggggcgggtctcatcatccgccgtctgtacggcgaagggaagatagacggagcggtcacgatgggcggaggccggggaacgatcgtagggggagaagtgatgcggagcctccctgtggggttcccgaaagtcatggtttccacccaggccacgaacagctatgcccagcatatgtttgaagggatcaacgacacctttgtcatcaattctcttgtggatatctccggtctgaatgagatattgaagatggtcatggataaggcggcggtcacgatagctgctatggtgaaaatggagcaggccgcgcttaaaaagacgaggccgagaatcgccatgagcatgctcggcatcacgaccccgtgtgtgtccgcagtgcagcggcggcttgagcaggccggctttgagacgctcgtttttcacagtaacggacttggcggaacctgcatggagaagatgatacggcagggatggatcgacggcgctgcagatattacgacggcggagctgacgccgggcgaactgggaggcataggttatgccgggccagagcgccttaccggggcggccgatatggggatcccgcaggtcatagtgccgggggcgatggatatcattgactttgcgccgccggagtctgtcccggaaaagtatctgaaccggagatacgtcatgcacgtctctgcgctgaaagtcgtgaggacgtcggcagaagaaaacaggcatatgggaaagcttatggcagaaaagctgaatcagtcccggggaaaagttgtggtggcctttccgatgagagggctgtccgccaatgatcatgagggggccgcgttctacgaccgggaggcagatatggcgctgcttgagacgctggagagaaacttaagagaggatataccggtctgtaaatatgacttccatatcaacgatgaagcatttgcggaggaagtggcaaaacttgtcctaaacgtaatgcggcggtaaatatatggaaataaatggaaaattgttgtaagatgaatacagaaaatgacaagttggggagaaagatatggcgaacaaaaaaaggagtcagtctctgtattttaagatcaaagacgatttgaaagaacagatcatttccagacagctgaaggcagatgaccgcatcatgtcagaggcggagatatgcgagcattataaggtgagcaggatcacggcgaagagggcgctggacgaacttatgtgggaaggttatatcacgaggaaaccggggaagggcagttttgtcacttaccatgcgatcgaacatctgctgaacggcttctacagtatcagcgaggagatacgcagaaacggtctgataccgtcggtaaagcttctggagttcctcaccctcaaggtggaagatacggtcgtatcggaggaactaaaagcaagacttgggctgtcgggcagtgacggtgtgtattatataagaagactcaggctcgccagtgacgagatcatagcactggagacgtcctacattccggcgcgggatttcccgggtcttgtagagacagacctgcagagaggagcagcgctctatgcagtgctgcaggcgggatatggctgtgaaccggacagaagccaggagttgttttccgcccatatggtgagcaagaaggaagcgcaggcgctcggcgtccgcccggaatccgcggcgctgaaggtcgtaaggatatcctacgcggccgacaggcccgtggaatatacggagcggctcttccggggcgacacatatacctataaggtagaacttaaaaaacacaagacggccggtgaaaacgaatagccggccatgtgaggcagaggaggggagtatatccctcctctgctttctttattggaacgtatacggcagaacatttaaagagaaggagcagtgatggaatatatgaaaacaaataaaatcgttataggaaactggaaaatgaataagagtgtccgggaatcagccgcctgcgcaaaggaactgctggacgcaaggtatgatctgacttctgttaaaagtacggacatcgtattgacgccgtcttttctggcattaaatgaagtaaagaaggtatgcgcaggcagaaacggcatctcgctcggagcgcaggacgtgtactgggggacgggaaattactgcggcgctgtctcagccaaaatgctgtcggaggtgtgcagctacgcgttcgcagggcattccgagcggcggatacattttaatgacacggatgagaccgtaaaccggaaggtgaaggcatgtatcgaagcaggcatcacgccgatcttctgcatcggcgaagatgaagaggcaaacaacgccggaaagacgaaagaagttatcaggcgtcagatagagtcaggtcttgcgggggtgagaccgtgtgagatggtcgtactctatgagccggtgtgggctctgggcacgggaaggactccatgtacagaggatacagaggagatcatgcgctttgtgagagagattcttcatgagctgttcggcgccggggcaggcagggggataagggcggtatatgcagggagcgtccgcccggaaaatgcggccgcatatgcgcgcctgccgcatgtagacggagtggccgtcggtacggcgagtctcagcgcagggaagctggctgctattatccatgccgttgacagggcagtttgaccggaaaaagatcaagaaaatataagcatgctgaaacgaaagcgaaatatgcacaaaaaaagatgcaaaaatatgtgtatcatgtataaagcgcataagaaaatcgatactacacagaaaaatattgtatatattagtaaattccgatcccgtatactgtaaccatgtcagatgtgaggtcactcacgagaaaaatatggaggaggaaatgtaatgaaaaaagaaagagtaacaagattgctggcggcagggctggcagtgatgatggttgcaggaatggcaaccgggtgcagaaaaagcgacagtggttcttctgacggagacaaagacaaaaaagaggcgtcctcagacgtgctgatcggttcagctatctacaaatttgacgacacatttatgacaggtgtccgtacagccatgacagatcaggcaaaagagtccaaagtagaactggagctggtggattcacagaacaagcaggcgacacagaatgagcaggtggatacatttatcaccaaaggtgtcaatgctctggcgataaacccggtagaccgtaccgctgcagcgcctatcattgagaaggccaaggcaaaagaccttccgatcgtattcctcaaccgtgagccggaagaggcagacatgcagagctacgataaggtatggtatgttggagccaaagcagagcagtccggaacactttcaggagagatcattgccgatttcttcaaagcacatccggaagcagacaagaacggcgacggaacgatccagtacgtaatgcttcagggcgagccgggacatcaggatgcaacgctccgtacagaatattccgtgaaagcgatcgaagaagcaggattcaagacagagaagcttgcggcagatacagcgatgtgggataaggcaaaggcaacagacctgatgaaagcatttatcacaggccagggacttgacaagatcgaagcagttctctgcaacaatgacgatatggcacttggcgctatcgaggcgctgaaggctgaaggatacaacaaagacagcagcgaccttacaaaatacatccctgttgtcggcgtagacgccacagcaccggctcttgaagccatgaaggaaggctctcttctcggaacagtccttaacgatgcagacaaccagggcaaggctacagttaatgttgcggttgcagcagtaaacggagatgagatcaacgaagaaaacgtcggctatcctataacagacggaaaatatgtatggatcgactatgtaaaagttacagaagataattaccaggattatatgaaatagcagcagcgcgttgagcaaataaccataggggtggagtattccgccccgattggttgtaaaggaggagtgatgacatgggagaatatgtactggaaatgaacaatatcacgaaagtgtttccaggtgtcaaggctcttgataatgtcagtctgaaagtaaggcccggcagcgtccacgctttgatgggggaaaatggagccggcaagtctacgttgatgaaatgtttgtttggaatctaccatgaagatggcggagagattattctggatggcagacctgaaaagatcatgacatccaagcaggcactcgacctgggcgtgtctatgattcatcaggaactgcatccgatccggttcaggccggtcatggaaaatatatggcttggcagattcccgatgagaggaattgcggtcgataaaaaggctatgatcgagaagacgaaagagttgtttaaagaagtagatctggatataaacccggaagtattagcaggaacgttatctgcctctaatctccagctcgttgagattgcaaaggcagttagttataattctaaaatcattattatggatgagccgacctcatctctgacggataacgagacgcagcatctctttaagatcatccgccagcttcaggagaaggggtgcgcgatcatctatatttcccacaaaatggaagaaatattaaagatcgccgacgaggtcaccatcatgagagacggacagtatgtcggtacatgggatgccggagagctgacgacagacctgatcataaaccgtatggtaggaagggatatgacaaaccgtttcccgccgaaagaatacagccctctaaaggagacggtactgaaagtggagaagctctcttctccgctgccgaagtcgttccaggatgtcagctttgaactgaaaaaaggtgagatactcggcatcggaggactggtgggagcgcagaggaccgagcttgtggaggcaatattcggcctgagggagatcgtatccggccaaatagaaaaagacggaacaccgctcaggataaaatcgccgcgggatgccatccgcgagaatatcgcgctgctcacagaggagagaagagcgacaggtatcttcggcatcctgtcggtgatggataatacagtcatcgtaaaccagagagcgtacgcccacggcggggtgcttcgcgacagggagcggctgaaggcggcggaagcgtccaatgccgagcttcgcacgaagacgccaaacatggatgaacatatggagaacctgtcaggcggtaaccagcagaaagtgctgctcgcccgctggctgctgacagacccggatatactcattctggatgagcctacacgaggcatcgacgtaggagcaaaatatgagatatatacgatcatgcataagcttgtcaagcagggcaaatccatcatcatgatatcttcggagatgcccgaactgctcggaatgtcagacaggatcatggtgatgtgcgagggacgtgttaccggtttccttgatgccaaggaggcagattccgtacaggtcatgaactacgcaaccaagtttatgaaataggatttataggaaagagagggattacatatatgcagaacaaaggaaaagtagttgcccgcgataaatatggggtgacatttataggaattggcatcgcagcggtcgtgctggggctcgtattgtactatttcctggatcccggcgtattttatgacctgggtctgtatgtgataatggtgggcgcggctgctcttatatatggactaagacagcggtttgccagacaatataaaggaattgccgtagagctgtccacaaatacaggaaagaggttcctgacgaacaatgccattatgatagcgcttctgctcatgatcatcgtcattatgatcatacagccaagatttatgcagcttgcggtgcttcttgacatactgacgcagtcgtccacaaagatgatcgtcgcgctcggtatcagctttacacttttgatagcaggtacggacctttccgcaggacgtatggtaggtctggcggcggtcgtatccacttccatgctgcagacagcggattatgccaacagattctttcctgacctgccgcatatggtgctcatagttccgatcatcgtggcagtcattgcctgttcgctcttcggtatactgaacggatttctcgtcgcaaaatatgatatgcatccgtttatagcgacattggcagtgcaggtaatcgtatacggggcaaactccctttactttgacatggagccgaacaaatcacagcctatcggcggggtgcgccctgactttgtgctccttggccagaagaagctgttccagatcggagatttcccgggaatatctgtccttgtaccgatcgccatcgcgtttgttatcctcatctggttcattctgaataagacagtgttcggaaaaaatgtgtacgccatcggaggcaacagggaagccgcgatcgtatccggcgtaaatgtgttcaggacgatcatgtgtatcttcattctggcttccgtgctgtacggtgttgcaggtgtgctggaagccgcgcgtactgcgggggcgacgaacaactacggcaacgggtatgagcttgacgccatcgcggcctgcgttgtgggcggtgtctcgctgaacggcggcgtcggcaaggtgagcggtattgtaagcggtgttctgatatttacagttatacagtacggactgcagtttatcgcggtgagtccgatgtggcagcaggtcatcaaaggaatcatcatagcgatagctgttgcgatcgacttgtcaaagtacagaaagaaatagagcgaagcttatattgtgacaatatacaaaaactgctataataaacttagtttgttatagcagtttttgaagcatttatcattaatatcaacataccggggaggaaatgatggagtattacaagatattattagtggatgacgaattggagattcgtgacggaatgattcaaaaactggactggcacaagcttgggtatgacgtagcagccgccgcggagaacggtgttgaggcgctggaaaaggcggaacaggtccagccggacgtgatcatgactgatatccgtatgccgtttatggacggactggagtttatcgggaaggtgatcgagctgcgcccggctgtgaaaataatcgtattttcgggctttgacgattttgaatatgcccagaaggcgatcaacctcggggtggaagaatatatattaaagcctgtttcggccagacagctggagcagtctcttatcaggctgaagagcaagatggacgaagaactggagcagaagagaaatatcgacctgctccgaaggagctatgaagacagcttcccgatcctgaaggaacagttttttgtcagtgtgatagaaggacgtatgcttccaagacagatcgaacagtggctgaatcagtataaactgtcttttgcatcccgctataaagtagtggcagtgctgtcggcaggcgacaactcatttcccggcggcagaaaaaacgactttgcgggaagtgaagaacttattccgatcgctgtcaggaagacggcggaagatatcgtgggaaaataccatgaactgcacagctttttttattccaattatatcgtgcttgtggttgcgctggagtgggaatcgcagatatcacttttgtgccaggaggtcaacgaggcctgccgggaaggctgccgtattacttcttcagatgtcactgccgggatcggcggtatctatacacggtgggaggagcttaaatattccttcaaagaggcggaaaacgcgctggaatacagcacgctgctccggaaagaaggacggcttgcagcgtacataaaggatgtggagccggaggatacgacatccagactccagctggaagaacaagatgagaggctgcttctgaatgcgatcaaaggcaacaattgtgacaaggtgcgcagccagatcgagcggttctttgcgaggcttgagcaggcgagcctgccgttttaccagtatcagatgtatatcatggagatatttacagtgatcatgaagctcgttaatgtctatcagcttgatacaaaagcagtgtttgacggggagacaaattacatatctgccgtgctaggccttcattccctggaggagatcaagaactggtttatcacgacctgcggcagggtgagccggctcatacagaaagaaaggacagatacgggggaaaagctcattgagaaagcaaagcagtatgtggaagaaaattacacagatgcggaactgtcggtggaatcgctctgtgacaaccttcatataagcccggcttatttttctacgatatttaaaaaggagaccggagtaaattttatctcctatctcacggatatgcgcatggaacatgccatgaagcttctcgacacgacagatgacaaaacatacatgatcgctgccaagtcaggctatgcggaaccaaattatttcagttatgcatttaagaagcatgtagggatgtctccgtctaaatacaggaaacggctggaagaacaggactgaaaaagagattatgactgataaaatttataagttatttgaaagagtgaaatcaatataccagaagagaagcctgcagtttatactgtctatttcgtttacgctcgtttcagtcgcggtcatgataggcgttgcggcaggcttttcacagcgtttcgtaaagtcgacggaacggctggcgatcagcaataataagaatgtgctcgaccagatgaacctgaatctggacaattacctgcacaacatgatgagtatatccaacactctttattacagcatcatcaaaaatgtggactttggtaaggacagtgcgtcctatgtcggaagtcagatgaagcttctgtatgaggccaacgcgacctctctcgtcagcatagccatattcagcgacgagggagagctcatagcggcgcagccgctgagccggacaaaacagaatgtggacccggtcaccgcggaatggtttatccgggcgaacaagcagatcgagaatgtccacttttcaacccctcatgtggagaacctgttcatcaattccgataatatttatcactgggtcgtatcactgagccgttccgtagagatgacgaaggacggagagatcgtacacggcgtcgtacttgtaaatatgaactttacaggaatagaacagatctgtaaaaatgtcgatcttggcgaatccgggtacgtatatatcgtagaccgcagcggggagcttatctaccatccgaagcagcagctcatatacggaggtattacgagcgagaacaacaaaaaggcggcacagtattcggaggggagccatatcgagacgtttcaggggaaggagcgccagatcacggtcaagacggtgggatataccggctggaagatcatcggggtatctcctacggcggacatcacctcccagtatatgcagaacagccagttcatctggatcgtagcgctgatcggtgtcatcatcctcgtcttcgtaaatatggtcatatcttccagggtggcgaatccgataaagcagctggaacgctcggtccgtaagctggagcggaacaatctgaacgcgaaggtgaagatcgggggaacatatgagatcagacatcttggcaagacgctgcagtccatggcggacaatatgaaaaagctgatggatgatattgtaaaggaacaggaagacaagcggaaaagcgagatgtccgctcttcagtcccagatcaatcctcattttttgtacaatacgcttgattccattatatggatgatcgaaaatgagagatatgaaggcgcgatcgatatggtaacagctcttgcaaggctgttccgcatcagtctgagcaaggggaagaatatcataactgtcgaacaggagctgcagcatgcggagaattatcttatcatccagaaagtgcgctataagaacaagtttgattatgatataagtatggagaaaaactgcgcgcaatgtgctacaataaaactgatcattcagccgctgatcgaaaattccatttatcacggtatggaatatatggacggagacggaagaatatatatcagggcttaccggaaagaggacaccttatacatagagatagaggataacggccccggcatgacagaagcgcaggtggaggaactgcagaacggcacattgagatcgagcaaaggcaagggttcgggaataggatttcaaaatgtcagggagaggatccgcctttactttggacagcagtacggccttgatgtagaaagtgagccggacgagggaactacagttaggatacggctgcccgcaacgaccatagataaactggaaataggcaggggggattaaagtggacagaaggaaacgatatatattgttagccacagccgccgtcatgctctttactgcctttatctttggctggaacaattccgtccggaatgatgaaaaccatatataccagatatcatatatctacagaaacagttccatagaggagagtcagcaggctgtcaggcaggggatcgaacaggcggccaaagattataaatgtgaagtgaccgcagtggcatttgagccggccatcagccccacagagcagctggagcttgtcagcagagaggtgaaaaacggcgcggacgccgtactcattgaaccgttaaacagtgaggaggctgcggacggactggcgggtgtacagaaaaaaatacctgtgatacaggtgaatacatggtttgagtccgacgagggaagcatgccctctgtccatattgacaactataaaatgggaaaagaacttgcgcagaagatcgtaaaagatatgggcgcggcaaaacaagtcctgctcgtaaaatcagagatggagtatacggatgtatatgagacataccgcggcgtaaaagaatatctggagcgcgcaggcgtcggcataaaagagacgactctgagcgccagggaggccggcggggcagggacggtgcccggggcgctgaaaatgacagatgcagacgcggtcgccgtattcgggacaatgcagctggagttgtgcggtaagttaaagaaagaaaacacagcattatctcatacaaaaatatatggcttcggcaaatcaaaccagatcatttcttatctggaggaagagatgatacaggcgatcggagtaccgaatgaatacagcacgggatatctcggcgtaatgaaggctgtcagcggcataaagggagagcgccaggaagacaaaaacatagactattcgatcatagagagggataatatctacacaacgaagaaccagagacttttgtttccgtttgttcagtaaaggaaaagggcaaaaagtatgaaaagtttgagattcacaatggcgggagtgtgccttgcagggcttttgacgctgactgttgcagggtgtgcacaaaacgcggaacgtgataagaaagatacgatcaagataggtgtggctatttacagaggagacgacgcgtttatctcctcggtaagttcttcgatggaagaggctgtgaaggaaaaggaagaggagctggaccggaagatcatcgtcaatatcgctgacgccaaaaacagccagggaagtcagaacgatcaggtggacgattttatcagtaaggggtatgatgtcatctgtgtaaatatggtagatcgtaccgcggcggcagtgatcgtagataaggcgaaggaagcgggcattccgatcatcttttttaaccgggaaccggtggaggaggatatgggcatatgggatcagacatattatgtcggaacggacgcaaaggaagcgggagagctggagggacagatcgtagcagatgcctttaaggccgcgccggagcagattgataagaacggagacgggaagctgcagtatgtgatgctggagggagaacaggtccatcaggattctctcatacggacagagtattcagtcaagacgatcctgaaggaggggattccgacagagaagctggccagcgggacaggcaactggatgcgctctccggcgtacgagctgatgcaggaatggataaaagaatatggggacaggatagaagctgttatcagcaataatgatgagatggcgatgggggcagtcgaggcgctggaagaaaacggcatgaccgggagcagcggcccaatcgtcgtagggatagacgggacgcgggacggactggaaaagatcgtgaagggggaaatgataggcacggtgatgaatgtcgcgcaaaaacaggcggaatgtatggtagagatcgcctgttactgtgcacaggatgaaaatccaaaaggacaggtcgagtatctgaacggcagatatgtgcgcatacctcattatatcgtgacggcagacaatatagatgaggtcataaacgataaataatagtacgatgaaggaggactgaacagatgcggaaggacattctttctatggatcagcaggcggcagcgctggacaatgcacctgtagctgtatttgtaagggcggccagcggaggcaggctgctctacgctaaccgtctggcagaagagctgttctggcagaagccggagagcggtgaggagttgtgcccgttctgctgcacagaggatatgaacgaatccggattcagtgtgagagaattccactgttccatggatgaccgcatctatcagttcagcggcagaaatatcgactgggcgggacagcccgcgcagatagaatacatagtggacataacggataagaaaagggaagaggaacatttcagagcgctagaggaagagcttaaggcttccaacgataagatgcaggatatcatcaatgcgatccccggcggcgtggcgatctataaagtatccgacatatttgagaccgtctatttctctgacggggtgcctgaattgtccggatattcggtggaggagtataaagagctggtgaaaggtgatgccgccgacatgacttaccgggaagacaaggatatggtagtgtcaaaagccagggaggtcatagagacccgcggactgacgagcttcgagttccgcaagcagcacagggacgggcatatcgtgtgggtacgtgtccagatcaaatggatcggggaggaggaaggatgccctctgcttcactgtgtctttcataacatatcggatatcaaggaagcacagctggaaatgagccatatcgtcaattccatacccggagggatcgccagctaccaggtagtggataaccggtttgtcccgaccttctattccaacggcgttttagaactgtcagggcatacgagggaagagtatgaggagatcatacaggataatgcgctgaatgtcatatatgagcaggacaggcagcgtgtgctggaggcggccgcttccgctctcataagcggtgaagtgctggatgtctcctaccgtatgcggcataaagacggcaacctcatatgggtccatctcaacggcaggcgtatgggaccgctcgccgaagtgatgcggttttatgcggtatttacaggcatgtccgcagagacccggatcttccaggagatggccaatgagacggcggacggcatctatgtcataagcaaagagacgtatgagttgttgtatgtaaatgaggcaaaagacctttttgccgggaaaaacgactgcatcgggcagaaatgttacgaggcgcttcacggccgggaaaaggcgtgtgaattctgtactcttgggaagtatgaaccggacggagaggagcatgatatggccgttcccggttcggacaggtattacagcacacgtttccgtgagacagactggaacggaatacctgcttatgtgaagtttgtccgcgatacgacggaagaggtcaggacccggaaggaaaaagagcgactggaacagtatttccagaccgttctcagtaatctgccgggaggagtagtcgttgtccattatgaaaaagacggcagcatgacgccggagtttctgtcggatggttttgccgccatgacaggcatgacaacggatgaggcatggcagctgtacagagaggatgccatggccggcatacatccggatgactgtgcctacgtaaaagaacagatggatgaatatattgcctcaggcgccagcagctgggagatcatataccggctgaaaaaggacagcggctatgtatgggtaaaaaataccctctccctcatagagaacgaagggggcgagaggcgtatctacacagtataccaggatatgacaaagatacttaaggaacaggaacagatgcgccgccagtatcaggagatgctcatgaagcattaccatacgccgggagcggacacccttatcctcggacactgtaatatcacacagaatgagatcctggagatagatgactatacggggctggacatacttggcaccttcggcgctgtaagggaagaattttttaccggagtcgggagtttcatcgtagatgaggaggaaaggaagcggttttacggcacatatctgaacagaccttcgctggaggcttttgaacggggggagacagagcagaagatggattgcttcgtaaagcttccgcatgaagagaaaggccggtatgtccggtttaagatgaatcttgtcgctacgccggacagcggggatataaccggcgtgctcacagtgaccgacagtacgcaggagacagtgagagaccgtatcatgtatcagctctctgcgtcggggtatgattttattgcggacctggatgtgacagaggacagatatgtgattctgtcatgcagcgaagacgcaagcagtgttccgcccggggaaggctgtcattcaaagtggacagaagaaatgctccaaaacagagtggtgccaaaagacagggagcgttttaggcggaacctggatactgcagtcatgttaaagaggcttggaaaggggcgttcctatacatttgcctactctgttgcggaagagaacggagatatccgtacaaagacgatgaccgtatcggccgttgacctgcgcattggcagagtatcgctttccagggcggatataacagagtcggtccgtgagcagcaggcgatgctccgcgtgatcgcatatacatttgagcttgccggttttattgacataggaaccggaagctttacgatgtatacgagggaaactgtgcttgagaatctgcagcctcactttgtggcggattactcttctgcgcttctgcagttcgtaaaaagatacgggctgcaggagggtgaggaagaattatacaactgcttccgtacggagacgatgaagaagaagcttgaggagaagccgaacggatacgactttttgtttccgtacaggcaggacggcggtgaacgctataagcagatcaatgtcatgtggggtgatataaaccacagtaccgtctgcctcgtccaggcggatgtgacagatatgctggcggctgagcggaagaataaaaaggcgctggagaatgccctcgtgcttgcggaagaggcgaaccgggcaaagagcgattttctgtccaccatgagccacgatatacggacaccgatgaacgccatcatcggaatgaccacactggcggtggcgcatctcggagattcggggcgtgtggcggactgcctgaataaaatatctatttcttcaagacatcttttgagtcttatcaatgatattctggacatgagtaagattgaaagtgcacagatatcgctgaaccggatggagatctatcttccggatatgctggagaagctgtctgcgatcattgcccctcaggcaggggaggccggtatccggtttgacataaggacagaggggatccgccacaattatttttacggcgacgcactgcgcattgaccagattctcatcaacattctgagcaatgcggtgaagtacacgagggaaggcggaagcgtcatgttcgccgcagaagagataccgtccgtcagacaggcagggtggctgcgctaccggtttacggtcagcgacacagggatcggaatgacggatgaatttctggagcatatctttgatccctttgcccggagcgcgggcacgcagcgtatcgaaggcaccggactgggccttagtattacaaaaggtcttgtggatctcatgggaggtgagatatccgtacagagtacgccgggtgagggcagctgttttcaggtcgagctggaatgtgagtctgccaaagaggcggaagcggaccggaaagcagaacgaaaagcgccgggcgcggatgcttcggatgacaggctgtttgaaggacggctgtttcttgtggctgaagacaatgagataaacgcagagattctctgtgaactgctgtccatgtacggggcggaaacagtcgtcagggagaacggccgtcaggcggtgcaggcgttccttgacgctgcccccgggacttatgatgcagtgcttatggatatacagatgccggagatgaacggatatgaggcggcgcgcgccatacggcagacggaccgggatgatgcggcggtgatacctatcattgccatgacggccaatgccttttcggaagatgtaaaggctgccggtgagtccggtatgaacgcccacgtggcaaagccggtcgatgtagagatgctgcgggagacgttaaaagaagttatgggcaggacgaagtaatatgatccggaacagagacaggacagcagtttacaatattattgtttcttaagcatatcgcatgatatcccctgatacagaggcaggatcatttctgtatcaggggatatttttatataccgtgaatgtattttttttacaggcaatgatgttctctgccttcagtttgctgatctcgccggagagggcgctgcggtccacagaaaggtattcggccagctgctggcggttaaaggggatctcaaaggttgagcggccgcatttgagcgattcagccgagagataggacaaaagtctgccgcggatcgtgcgccttgtcaaatgttctatctttctggtcagttccacattttttgccgagacagcggacagcagattctgtatgatcctcgtgtgaaatgaacaggcagaagtgcagacggtcaaaagctttctgacgtcgaaaaacatgacctctgtatcggtgttggccacaacacttgcctctaccggcatttgggacagacaggcataagcttcagcaaatatagctccgggcagtatttcagaaataatggagcggtccccccagaaatcttcctttacgatcaaaacggagccggacagtaccataccgatggaatgcacgcaggcccctgcgcgtagtatatagcagtttttattgtaagtttttgttttggccgacagacagcccagcatggcatcaatttcctgcgcgttaattccgctgaacaattctgtgtgttccagtaatgttacgtattgattcatattcagttcctgttctcgtccggaatcagaatgttttccatttccggaaagtcaagctgcgacaaataattcacggtacttcggagttcatagatgataagttcttcaagcgctgcggagaaacgcgaataatcctctttctgcagcgcctcggccaaagcgtcgaaataaggagcataaatgcggttgatgtattcctggcttccttccattccgcgcagggcataggcccaaaagaattgaagcagcagctcggagtaaacggttctaatggtctgtaaaggagcaagttctgcgatcgacttcagtatgaaataggataaagtttcgccgcgctgccgttttctgtttgaatccagttcccggagcagctgtctgacggaagccccgtcgagagaagaaagcgtgagcagggatacctcgcggcaggacagcgcaagtatctgaaggctctctgtcatatcaagaagccgccggcgcagaacagggttggtgaaatcgctgttttctgtggttttatcaaacggaagtatttttgtacctacatatttcgtggactttatcgccccgacgctgtaaagaagatcaaacgctctgcggaccgtgctcaaggaaatgcctttccgggccgccagttccttttgggatgggagcaggcttccgacaggatatttgccttggctgatcgagaggagcagctccatggcaaatgaataacagagctgctggtttttcctgtaagaactccaggcaaatgtaatctcttcctctgcgggcggcgcagtgatcctcgtctcgtagaaccggttcaaagcaaaagataaccgcttcattgtccgttccacctcagcgcgcagggagggccagtctttgttccggcagagggtcataaccgtaggaagataatcagcagacggctcaaaatactgcagattatctgtgaaactgaatataggaacgtgtaaaaacatagagctctgccagacgagacgcataaggagggcgttcccgagggcgctgtacttttgattgatatgcgtcagtatagcataaggagccgacgtgctgacttcgcgggaaagccggtccatcgcctgcagtgtctctgatgacgcatttttcagcccattccactgcacattgccaaacagagggaacatagaggccgccaggtcaaatattgcatgtttgcgcatggaaaaaaaggtctggacaaactgttccgtttcctgggcactgagtttaacgctgacagtggcccccaccttctttgacagggtaatataccccccgtctctgagcttcagatatgcggcgcgggccgtatcgaccgatacgcagagcagggagctggtctcttctatgttggggagcttttccccgtaacgatatgtgccaaactgaatctgggtaagcaggacgttgtaaacgaccttgcgcagttctgtactgttttccaaaatggtacctccattaataaaaggaatattaaagatggtagctttaagtatagcattttttcatccgggtttccacaagattccttctgccgtctattgttgctattttgtccgcgatttgttatacttcaatatatatgtatgtgaataattagaaaatctcaaatcaatatcagcggatgaggagaagtgaggagttaagacagatgcagaatacagtaaaaaacaaggagttgtccgtgggcaaaagccaacggatgagtattgtcagtacgacggtcctcattctgctcatgcttagctacctggtgatgactatcagcaattccaccaagcttgcggcccagacggagatcatctcaaaccatccctttgaggtggtgatatgtgccgacgacgtaaagctctatgtgtcggaaatgagcctcaggaccgggcggctggagcgccaccacaacagcgatgacgtggagatcgccgccggcaaactggaagaactgtatcagtcgcttaaagaaccggttgcccatgttgagaaattatatctgggcgatgcagaagacgtgcaggaactggaaagcacgctggcacttctgcagacggaacagaacgtctatctggaattttgtctgcagccagggctcacagaggagaatatcgaagtctacacacaggagcatctccagcccctttatgatcaggcggtccatcaggcggagcatatcatctccaccgcgcaggagaaaaaggtgggatatggggccaccgctgaaacactgcggatttccagcctgatcggatctgttctgctgatgggactgatgatagtcgtgctgctcgtatcccagtatgtccttcaccgtcagagaaaagagctgatgtacagaagtaaactttttgactgcctgtctctgagcatcgatgacgcttttatcattcgggatgcggataccggggcgatcagctaccgcgggctcaacctggagcggatccttggaatccctatggtggatatggaaagcctgtatcaggggctgaaggaagaggacgcccgtattttcaaagaggactataacgctgtgcagtctgcttccccgtatgaaaagctggtggaatataccagacccgataaggaaaagcgctggatgctcgtgcggatctacaaggtggaagatatgaatgccccgcagcttatcaccgtattttccgaccgcacagaagaggtctgttcgcgtcaggccctgcaggaggcaatgctggcagcggaaaatgccaacgcggcaaagagtgagttcctgtccaggatgagccacgagatccgtacgcctctgaatgccgtcataggcatgactacgatcgcggcggcgtcggtcagtgatcctgccagagtagaggactgtcttacgaagatcacgttttcgtccagacaccttctgatgctgatcaacgacgtgctggacatgtctaaaatagaaagcagcaagatggctctgcagaatgagccgtttgatatctttgagatcgtcaacggctttgtatccactgtttatgctcaggcaaaaagtaaagacattgtgtttgaagagacgatggaagggttcggaaaagatacggtatttatcggagattcgctgcggctcaatcagatcctgctgaacctcagctccaacgcggtaaaatttaccccgccggggggcagcatccatctggacgtttccagatataagaaaggcaaccaggccgacgtgatccgtttcattcttaaagataccgggatcggtatgacaaaggaggctgtcggacgtatcttccagccgtttgaacaggcagacgcttccatctcaaagcgttatggcggtaccgggcttggcatgtctattacccgcaatctgatcacattgatggggggacagatccaggtagagagcgagcctggtctggggacagcctttatcgtagatctgccgtttgaaaaaggagaagaaaatcaaatgccggagcctgattttgggcagcagaagctcagggcgctgatcgtggatgacgagaggctggtgtgcgaacagacggcggttcttctcgaaaagatcaagatcgacgcacagtggcgccagtcaggcgccgaggctctggaacgggtgaaggagagccgccgggagggacaagacatcgacctttgtctcattgactggaaaatgccggatatggacggcgttgaggtcacccgccgcatccgcagggaggtgggaaacgacgtacctattgtgatgatatcggcatatgatatctcagaggtggaagaggaagcgcgggctgccggagtgaacgggtttcttccgaagccgctgtaccgttcttctgtttacgccgctgtcaaggcggcaatggaccgtaaaatgccgcatcctgcagacgcggagcataaatcagccgataagcccctgaacggcatccatctgctgatagcagaagacaatgcgctcaaccaggagatcgcggcggcgttgctgcgtatgaacggcgccgcggcagactgcgtggatgacgggcggcaggcagtggacgcatttctcgcttcaaagcccggcgaatacgatgcggtgcttatggacgtacagatgcccgtgatggatggctatgaggctgcgagacgcatccgtacttcagatcatccgcaggccggtacgattccgatcattgccacaacggccaatgcgttcagcgccgatgtctcatcagcgctggctgcgggaatgaatgcccatgtgagcaaaccgctggatgtcacacaactttgcaggacacttttagactgcatccgcagggcggatgactagacagacgtaaaaagtacataataatgacagataggaagacggtttagtattaaacggtcttcttttatctgtttagtacaatttacctgatggtcaatatataaaaaatgtgctaatctgattgacgtacacatatatatggagtaaaataaacaagaacgtttgttcccaagtgtgcttaaaaagatagaacagatatatagatcacaatgcgaagaaccaaatttaaaacccgtgtgaggaagttgtaacttcccggaacataacaggagaatagcgtatgagtgaagaacagatatttaaattagaagctccatataagcctaccggtgatcagccccaggcgatcgaacggctcgtaaaaggttttcaggaagggaatcaatgccagactttactcggagtcaccgggtccggcaagacattcactatggcgaatgtcatccagcagctgaataggccgactctcatcatagctcataataagacgcttgcggcccaactttacggggagttcaaagaattcttcccgaacaatgcagtggaatattttgtctcctactatgattattaccagccggaagcatacgtgccgtcttccgacacatatatagcaaaggattcttccatcaatgacgagatagacaagctgcgccattctgcgacggcggcgctgtccgagcggcgagatgtggtgatcatcgccagtgtatcctgcatctacggtcttggaagtccgatcgattatcaggagatggtcatttctctgcgcccgggtatgataaaggaccgggatgatattataagaaagctgatcgatattcagtatgaccgcaatgagatggactttaagcgcggtacgttccgtgtccggggcgacgtgctggaggttatcccggccatgaacgactgtgacgtcatccgcatcgagttttttggagatgaagtagaacgcatcacggaagtggatgcacttacaggtgagataaaaaatgaactgaatcatatcgccatatttcccgcctcacactatgtcgtgtccagggagagtatggagcgggcggtaaaagagatagaagtagagctggaagagcagatccaatattttaagagtaaaggaaagctccttgaggcacagcggatctccgagcggacgaattttgatatagagatgatgcgggagaccggattttgttccggtatcgagaactattccagacatctgaccggactggccccgggacagccgccccacacgctgattgactattttccggacgattttatcatgatgatagacgagtcccacaagacagtgccgcagatcggcggtatgtaccacggcgaccagtcgagaaagtctacgcttgtggactatggattccgcctgccgtccgcaaaggacaacaggccgctcagttttgaggagtttgagggcaagctgaatcaggtgatgtttgtgtccgccaccccgggccgctatgaagcggagcatgagcttttgcgggcggaacaggtcatccgtcctacgggacttctggatccggaggtggaagtgcggccggtggaaggacagattgacgatctggtgggtgaagttaacagggaagtagccaagaagaataagatccttattacgactctgacaaagcgtatggcagaagacttgacagattatatgcgggaactggggatccgtgtaaaatatctgcactccgatattgatacgctggagcgtaccgagatcgtccgtgatatgcgtctggatgtgtttgacgttcttgtcggcatcaacctgctcagagaaggacttgatatccctgagataacgcttgtcgcgatcctggatgccgacaaggaaggtttcctgcgttccgaggtatcactgatccagacgatcgggcgtgccgcccgtaattcagaggggcatgttatcatgtacgcggataaggtgacagattccatgcgcctggcgctggaagagacaaagcgccggcggcagatacagatgaaatacaatgaggagcacggcatcaccccgcagacgatacaaaaggcggtacgtgatctcatcagtatatcaaagaaggtcgccacagaagagatgcgcctggagaaagatcccgaatctatgagcaggaaagaactggacaagcttataaaagaggtgacaaagcggatgaagacggctgcggcagaactgaacttcgaggccgcggcggaattgcgtgataaattagtggaattgaaaaagatatcagaagatttatagaattttcataggggtcagacccctcgcgctgcaggggtctgacccctgtggaaattgacagaaaggaatgtatgatgcagaacaaagctgatgagaaacagtatatcaagatacgaggtgccaatgagcacaacctgaaaaatttagatctggacatcccgaggaatgaactggtcgttctgaccggcctgagcggttccgggaagtcttccctggcgttcgatacgatttacgcggaggggcagagaaggtatatggaatcgctgtcgtcctatgcgagacagttcctcgggcagatggaaaagccggatgtggagagcatcgaagggctctctccggcgatatccattgaccagaagtctacgaaccgtaacccgagatctacggtcggcacggtgacggagatatatgattatttccggctgctctatgcgcgcgtcggaacgcctcactgcccgcagtgcggcaaggagatcgtgaagcagacggtggatcagatggtggaccagatcatggacctgccgtccgggacaaagatccagcttctggctccggtggtgagaggaaggaaaggaagacatgaaaagctgctggagcgcgccaagcgcagcggttatgtccgtgtgcgcatcgacggtaatctgtacgagctgtcggaggatatcgcgctggacaagaatatcaagcataatatagagatcatcgtcgaccgtcttgttgtgaaggaagggatcgagaaacgtcttactgactctgttgagggcgtgctcgcgctggcggaggggcttctcgttgtggatgtgatcggcggggagacgatgaatttcagtcagagcttttcctgcccggactgcggcatcagcattgatgagatcgagccgagaagcttttccttcaacaatccgttcggcgcctgcccggaatgtctcgggcttggctataaaatggaatttgacgaagatctgatgatcccggacaaaaatctgagtatcgcagaaggggcgatcacggtcatgggatggcagtcgtgtacggataagggaagctttacccgttccattctcgacgcgcttgcagatgcatacggtttttcgctggagacgccgtttaagaaatatccgaaaaagatacatgacatcctcatatacggtacgggcggaaaagaggtcaaagtacattataaaggccagcgcggcgaaggtatatatgatgtggcgttcgagggactgatcaagaatgtggaacgccgctacagggagaccggttctgagtcatccaaggccgagtatgagacatttatgcggatcacgccctgccatgagtgcggcggccagaggcttaagccgggcgctctcgctgtgacgataggcggtaagaacattgcagaggtcacggccctttcaataggaagacttcagagatttctggacaggctgaagctgaataagcagcagacactcatcggcggccagatactgaaagagatcaaggccaggatccagtttctcatggatgtgggtcttgagtatctcacgctgtcgagagcgacaggctctctgtccggcggcgaggcgcagcggatccgtctggcgactcagatcggctccggactggtaggcgtggcatatatacttgatgagccgagcatcggacttcaccagcgggataacgacaagttgctgaacacgctgaagcacctgagagacctgggaaattctgtcattgtggtggagcacgacgaggatacgatgcgcgaggcggatcatatcgtggatatcgggccgggcgccggtgagcacggcggagccgtcgttgcgcaggggacggcggaagagatcatgaaaaaggaagattccataacaggcgcgtatctgagcggcaggctggcgatcccggttccggacgaaagggcagagccctccggatggctgaagatcaaaggagccagagaaaacaacctgaaaaatattgacgtaaagataccgctcggggtcatgacatgtgtgaccggcgtgtccggttccgggaagagttcccttatcaatgagatcctctataagaggctggcgagagatctgaaccgcgcacggaccattccgggccggcacaaggatattgagggcatcggccagctggacaaagtgatcgatatcgaccagtcgccgatcggccggacgccccgctccaacccggccacgtacacaggcgtatttgacctgatacgggatctctttgcggccacgccggatgcaaaggccaaagggtacaaaaaaggacggttcagctttaatgtgaagggcgggcggtgtgaagcgtgcagcggtgacggcatcatcaagatagagatgcacttcctgccggatgtctatgtcccgtgtgaagtgtgcggcggcaaacgttacaacagagagacgctggacgtaaaatataagggaaagagtatatacgatgtgctgaatatgacggtggaggaggcgctcgagttttttgagaatgtgccgagcatacgcaggaagatggagacactgtatgatgtcggtctgtcctatatccgtctcggccagccgtccacacagctgtccggcggagaggcccagcgcatcaagctggcggcggagctgagcaagcgaagcaccgggaagacagtatatattcttgacgagccgactacggggctacattttgcggatgtgcataaactgacagagattctgcggcgtcttgcgtccgacggcaatacggtgatcgtgatcgagcataatctggatgtgatcaagacagccgattatatcattgatatcggaccggaaggcggagacaaagggggaacggtcattgccgagggaactcctgaggagatcgcggcaaatcccgtctcatacacaggaaaatatattgatgtcatgctccataaatagcatgttccgccggccgtccgtgccggcggaacagagggaaaggaacggccgctctgcgtcggaagcggccgttcctttccctgtatttaaaaataatgcataaatatgtctggctggatgcatattaattagaaaaacgcctgcagttcgggttgttgcatttggattcacaaagaattaaggaaaaaaggggtttccattttttgaaaatttgattataatgatacatgcacgtacccaggattatccagatacgtgctttggatgataaacaaatgataatcatatagatagcataatgaaaggggaagaagaatgtcagtagatattggaatcgatttagggactgccagtatccttgtatatgtgaagggcaagggcgtgatactgaaggagccgtctgtcgttgcatttgacagggacacgaacgccatcaaggcgataggagaagaggcaaggctcatgctcggcaggacgccgggcaatatcgttgcgatccgtcctctcaggcagggcgttatctccgactatacagtgacggagaagatgatcaagtactttgttcagaaagcgatgggaaagcgtacatttaagaaaccgcgcatcagcatctgcgttccgagcggcgtgacggaagtggaaaagaaagcggtagaagaagcgacatacgctgccggagccagagaagtgaaccttatagaagaaccggtagccgcggccatcggcgcgggcatagacatttccaagccgtgcgggaatatgatagtggacatcggcggcggaacagctgacattgcagtgatctccctcggcgggaccgttgtcaatacctctataaagatagccggagatgatttcgatgaagcgatagtgagatatatgcgcaaaaagcataatctgctgatcggggagcgtacggctgaggatataaagatcaagatcggtacgacctatcccctgatcgaggaggaagctattgaagtgaggggaagaaatcttgtcacaggtcttccgaagaccgtaaccgtcacttcttcagagacggaggaagcgttaagagagacgacaggacagatcgtggaagctgtcataggtgtgctggagagaacgccgcctgaactgtctgcggatattctggaccggggcatcgtgctgaccggcggcggggcaatgctgcgcggcctggaagaactgatcgaggagaagaccgggatcaacacgatgacggcagaagacccgatgaaggtcgttgcgatcggtacaggccagtttgttgaatttatgagtgggcgaaaagatatttaatggaaacgataaaaggatatgtagaacacatcgtataccggaacgaagagaacggttatacggtatttaacctgaacaatgaggacggagaactgacctgcgtcggcaacttcctgtttatcgaggagggagaactgctgaacttaagcggcggttatacgacgcataagctgtacggaacgcagttttccgtggagtcttcggaggcgtgtgagccggaagaccttgtatccatagaacgctatctcggatcaggcgccgtaaaggggctgggggccgcgcttgccgggcgtatcgtaaaacgcttcagggaggatacgttccgcatcatagaagaagagccggagcgccttgcggagatcaaagggatcagcgagcgcaaagcgagggagatcgcgcttcaggtggaagaaaagaaggacatgcgccaggccatgatcttcctccagaagtacggtatatcaacgtcgcttgccgcaaagatataccagcattacgggcagagcgtttaccgggtcatagaggaaaacccgtatcagatcgcggaccacgtatccggtgtgggatttaagaccgctgatgagatcgcggcgaaggttgggattcatacagattctgactaccgcgtacgcagcggtattttctatacccttcttcagagtatcagcgagggacatatctatctgctgcaggagacgctcctgtaccgcgcaggacagctgctcggtgtggagatacggcacatagagaagtacctcatggacctggccatggagaaaaaaacggtcatgaaggaggcagaggacggcgtgcgtgtatacgcggcccattattattatatggagctgaacgttgcaaaaatgcttcatgatctgaacataacgtatgacgtatcagaaagcgctctgagacgccggcttaaggcgattgaagagaatacggggctggagcttgacgagatgcagcgaagcgcggtcatggaggctgcggggcatggtatcactgtattgacaggcggaccgggaaccggtaagacgacaacgatcaatgccatgatacgtttctttgagagtgaagggatggatatttttctggcggcgcctaccggcagagccgcaaaacggatgacagaggcgactggatatgaggcgcagaccgtccaccgtcttctggaggtaaacggcaatcccgaggaggaggggagaagcggtttcctgcgcaatgcagaaaatccgctggaggcagatgtggtcattatcgatgagatgtccatggtcgacctgccgcttatggccgctctgctggacgcgatttgtcccggcacacggcttgtgcttgtgggcgacagaaaccagctgccctccgtcggcccgggaagtatactgaaggacattatagacgcacactgcttttccgtcgtaatgctcacaaagatcttccgtcaggccggagaaagcgatatcgtggtcaatgcccataagatcaacagaggagaagaggttgtgctggacaataaaagccgcgatttctttttcctgaaacggcaggacgccaatgtgatcatcagtgtgctcataacattgatacagaagaagctgcccaaatatgtacatgccgagccttatgatattcaagtgctgacgccgatgcgcaaaggcctgctcggagttgagcgcctgaaccgtatactgcaggaatacttaaatcctccttcagaatccaggaaagagaaggagtatggggggcggctatttcgcaccggggacaaggtcatgcagatcaagaataattaccagctggaatgggaagtgtccacgaagtacggaatgaccattgacaaagggctggggatattcaacggcgatatgggcatcataaaggacatcaatacatatgaggagaccatttcggtggagtatgatgaacaccgggtggtaaaatatccgtacagcttattagacgagctggaacttgcatatgctattaccatacacaagtctcaggggagcgagtacccggcggtagtgataccgcttctcaaaggcccaaggcagctgtatcacagaaatcttctgtatactgcggtgacaagggcgagacaatgtgtaacgcttgtggggagcgacacggtattccaggatatgatacagaacacgaatgaacagaacaggaatacgtctcttgcggaacgaatccgggaattaaaatgaaagatacaaatgtcctgaagcttttctggccggaaacatgccctttctgcggaaaggtgcatagtgaaggcgcctgccctgcctgcttaccggctgtaaagcggctggaactgaaaggaccaagatgtatgcagtgcggcaagcctgtcagacggacggaggacgaatactgccgcgactgcgcgcatacatatcatcactatgacagggggagcagcatatggcttcacaaacctcctgtcagcacatctatctatcggtttaaataccagaatcagagaaattatggaagctactatgccgaaaaaatgacggagaagtgcggggcgtttataagagcatgtgatccgtatctcatcgtacctatcccattacaccccagaaaaaggcgcagcagagggtataaccaggcggagatactggccgcctgcctcggaaaacttaccgatatacgtgtggacagcagaggacttgcgaggatacgcagttccagtccacagaagctgcttggaagcagtgagagaaggcggaacgtgcggggggcttttgcagtcacggagcatttcaggcccgtgccctctgtcctgctcatagacgatatctacacgaccggaaatactgtcgatgcggccgctgaaatactgaaaaaagccggcgttgaaaatgtctgttttttgactataagtattggacaaggatactgatatttgttatactaaaaatgatgtttaattatatgaacaggaatttgaggtggattatgttagatgagcggagagtgaaactgatgacccagcttgccttttatgagcagacgcagggaaagcaggatttcaagataagtgaatattatagaaaagactatgcaggaatgcatacgatctgttccatcctctgggtgacggtcggttatgtatgcgcgcttgcactcatttttctggccggtatggaaagcctgatggcaaagatgtcgaacggactgatcataacattaggcctggctgttgtcatcggttatttcgtgctcgtcatcgcgtatgcggtcataacgagccatgtttataatctgagacataagaaagcaagacagcgcgtgaagaagtataatcataacctgacgagactgcttaagatgtatgaaaaggagaataagtaaatggaaagtttgttcgtactccggggacggctgcaggaactgtatgccaggaattctaaggtgatagacaaggcaatccagtttgtgcttgcgcttgtaacattttatctgatcaatcataacataggttttatgaaactggccgcatcaccggctgcaacagttgcactggcagttatctgcaccttccttcccatgatcatgatcgtgatcgcggcggcggcgcttattctgatccatacattttccgtctcccttgcaacgcttgcggtgacggcgattgtatttcttgtgatgtttatcttctatttccggctgacgccgaaaatgacactgatcgtactgctcacaccgattgcgtttgcctttaagataccgtatgtgataccggtcgcattcggcctcgtaagcgcgccggtggccctcgtggcagtctcctgcggcacgatcgtctattatatgctgaaatatgttaaaagtacggcggctgttctggagagcagcggggcaaaaggacttatgacgcagatcagcgcgtatgccaagcaggtattccagagtaaagaaatgtgggtgatcattgcagcgtttatcatctgtttctttgtcgtatatacgctgcgcagacagtccatggaccatgcatggaagatcgcggtcgtggcaggagcggttgtggacgttgtcataatcgcggccggggatatcgctctcggggtacatacttcctatggaagtctgatagcaggaagtatagcggcagccgcggcggggctgatactggaatttttctttttctctgtggattatgccagaagcgagagcctgcagtatgaggatgacgagtattactattatgtaaaagcgataccgaagatatcggtggctactcctgaaaagactgttaagcgtatcaatgaacggcaggagacagagatcatagatacggaagaagtgagaagaaaggccagacgttccggcggggcagcggcgaaaagaccgcctgtggaaagagaggccgaccggaaagcgccggcagagagaaagaagaagccggcgccgaaaaagggcccttccgcgaagagccgcgtgatcggcaatacggaacagattctgctgacgcagagcctgaaacaggatctggacctggataagaaataaatgcgggggaagtatgaatgattaagaaggaggtgacaggatggaacagcagatcacacaactgatggaacgttatctgagtatcgtagacgtttattttcctgaggtgcatcttacggatgtcatcgaggtgataattctgacgtttctgatctatcagatcatgatctggatcaaaaatacgaaagcatggatgctgctgaaaggcatcattgtgcttgctgtctttattcttgtcgctgctattttaaaaatgcacacgattttgtttgtggccagaaattcggtcactgtaatggcgacggcggcgatcgtcgtgttccagccggagctgcgccgcgcgcttgagaagctgggggagcgtaagtttcttacgtctgtcgtcccttttgagacgaaccgggagcgtgtgagattcagtgaagagacgatggacagtatgatcgacgctgcctacagtatgggcgctgttaagacgggcgcgctgatcgtggtagaacaggcgatccgcctgacggaatatgaaagtaccggcatccgtctggactgtatggtttccaggcaggtgctgatcaatatatttgaacataatacgccgctgcatgacggggcgatcatcataagaggagacaggatcgtctcagcgacctgctatcttcctctgtccgacaatatgggactgagcaaggatctggggacgagacaccgcgcggcggtggggatgagcgaagtcagcgacgctctcgtgatagcggtctccgaagagacgggggcagtctccgtggcatcggggggacagctgtaccgcaacatcagccgtgaggagctcagggagaagctcacctcgatccagaataaaaagacagatacgaacaaattaatagcaatgtggaaaggaaggcaccatcatgaagagaagactgatgaataatattggtctcaagatattagctttctttgcggcactgctattgtggctcatagtagttaatatcgatgatccggtagtagacaaaacattttccaatatacctgtcaccgtgaccaacgaggaggtactgacagcggatccgaaaaatccgcagacctttcagatcgtagacggcacgcagacggtgaatgttaccgtagtcggcaagagaaagcttctgaatgagataaaggcggaggacatcctcgccaccgcagatatgaaggaattgacattaaagacccagataccgatcgacgttaccgtcaacggatatgaggggcggtacagcagcgcgtatgcgacgccgagaaatctgcaggtgaagctggagaaagaacagggcaagaaattcccgatcacgccgacaacgaccggcaccgtaagggatggatatgtgctcggagagatcgcgtcagaccctgagtctgtatttataagaggaccggaatctgtgatcagcaagatcagcagggtgacggcggaggttgatgtatcgggcatgtcgtccgactctgtgctgaagtctcagcttacgctgtacgatgaagacaacaatgagatcgaccagtcgctgctgacgaacaacctcggcagcaaaggggtaggggtcagcatacaactgctgcacacgaagaaggtcagcctggagtttgacacatccggaatctctgccgcgccgggatatgccttttcagagatcacatacgaaccgcaggagatccatgtatccgggaagtcagacgcgctggacagtataacgagcattcaggttccccggtcagcgctggaaatatccggtgtgagcgaaaagacagaaaagatagtggatatcacgccgtatcttccggataatatcagccttgcggatgaaaatgcaggcacggtcgtcgtgtccatcagtgtggaaaagaacggaacaaaatcatttgagctgccgcttggttccatcgctgtgaacaacctggcggagaacttgaagctgacatatggaatggcggaaaatattgagatacaggtacggggaccgagagagatcctggataagctcgaggcaggtgttgacatcacggcaaacatagatcttaagagctgtaaagaagcagggacatatgaagttccggtcaatgtgcaatatccggcaagctgctcgctggagcagagtatcaaggtgaaagttgtattggagagtaaagaataggaggacagtatggttagccagaaggtaaagatcacgaacccgacaggactgcatcttagaccggcagggatattctgcaatgaggcgcttaagtacgagtgtaaagtgacatttctgataagaaacacaacggcaaacgcaaagagcatcctgagcattctcggtgcgtgcgtcaaagaaggcgacgagatagagctggtgtgtgagggtgaaggtgaagaagaggcgcttaaggctatgaccgccatcgtggagcatgggcttgaagattaatgtctgatcgtatattgacaggcaggctggcatgtcttaatggatatcggaagcataataagtgacaataaatatgaaagacgggtaagcagattgcttcccgtcttttgtctattatctaacaatttaaagagttttctttattgtcaaattatagcaatatatgacaataatcgacaaaatgtgaattttttatacacaaacaagatttctgtagtaatttatatataaaatagttttttctcaatgtaagcggattaaaggagtgaatgatcacggaagacaaggagtacatctacattcaagacagcgagcatatctggaggaaagtaatgttgtcggatatctattatatcgagacgataaaatccactcattactgcgagatcgtctacaaaaacggggtaggcaagatacgcgcagatatcacgccgctgcaggaggagttcgctccatatttatttcggacgaaagcgtctacactggtgaatctggatctcgtgcagaaggtagacacaaagaacaggattctttatttcaatgatacgatatattgtacgtatgcgcagcgtctgtcacctgaggtgaaaaaacgcctcaggctttataattacaggagttacagggggagagaagatgagtgagcggccatatccatttgaaaagaaccggtactattatggaaagatgcttacatcggctgattttcaggctgagcagcggtacaatgagtacaagaggatgtttctgaatcagatggtcctggggagaggggttttatgcggccttggggtcaggatgctggacgagcggacgctccttattgagagcggggcggcagtggacggcgccggaagagagatcacagttcccggagatacggtaaaaaagctgtctgcgtttgaaggatatgacagtctggcagagcaaaaggcagtgctgtatgtgagatacagggaagagactgcgcagccggtctgtgttgtcaacagaaaagcagaacaggatgagtatgaagacaacagaatacgggagaaatatgagtttttccttgcagactgtcaggagagacagcagagcggaccggatgaggatttttttgtggaagcgctgctctcaggaggtcctgattatgcagtaagcctcagaatgcctgccgttgtcagcaggggaaggagagtgaggctttctcttctcgtggagaagctctcagatgaagagagcagtctgtctctgtcaggagtgctgaagcttccggcctttttgacagcggaaggagcacaggaactgcatatatgtgaagaagatattgtgcttgagtgcggagcgttccggacatatgatcactggctgtatgcaagtgaggtggaatttgattccacaacgatactatgggatgtggatgcgtcggcgatcaccgtcgacggcagcgcggcagagtgtgaacccgatccggaactgccgctcaggctgacggaccggacgcctgaggagctgatcaagtggagggtcggacagaagagtctggaagaaaagaaccatgggaatgaggaggaggctgtccggcttgcggaaatttccatcgcggatgaggcacacgatcatgtgctccgggaggtgagggaatttggagtaaaaagatacataccggtaccggagtcagaagagatatgcagagaatacctttcctattattctgaacatgcagaatatatccgggacatgctcccggcggccgaaaagaaagaggaagaaataccggccagggaggctgaagcgcctgtcatacggggagggacgctggaaattccgcttgatgttaagatgaaaaaggggaagatctgttattcggaagagatcatacacggactcgggccgggaaatgtatatgtggacgttggcgtctgcaatgtggacgacggggcagggagcagaaataaaagcgataccgttgtctacggagacaccggactgtttgagggaaaaaacaggcaggggatccctgcgcagacagctgttaaagtgtttgaggccagaggaagctttcaggttgccgcaaggctcaccggagagcagaatactatcgtactgcccctcaggtggacagcggtcagagtacctgacgggacggatacagacggggaggacggtaatatgcagatcgtaccggagactccgaccgtaagactgtcccagggagagaagcattacttttctgtccggttcaaaaacatgctgccatgtacacttaagtatgagctgatggaagacggaggcggtgagatcgaaccggacggcatatacactgcacctgcaaaagccggcatatatgagatcaggatatcttgcgcggatcacagaagcgtatgcacttatgtgtatgcagttgtaggagggaaggaatgagccttaggaaaatagctgctgtacgggaaggcagggtgaacgcagtcagtgtatgcacagattcggcggacgatgaatggcatacactgtgggaagtgaaaaaacacagctgcgccaggaaacttatggagatgcagggagcggccccctttggagattttcatatggatggggagcggctcagtgtcatacttgcatatgaagaaccgagaccccttgaacggttttatcagggcagtatatatacttgggaggaacggcgccgggtctacgataatctgaccgcggcatgtgcggatgccggtatgccatatcctcttctgtatctcctgctgaaggacaggtgtataaatatacgccgggatgacaccatttattttacctattacatactgctggacgagctgaaaccggaccggacggagcaggactgtgtaaggctggccgcagggatactggcggaattgatggaactgtacggaaaaaaagaagagcggtcgtgtcttgcgcttatccgtaaaaaacagaaaagaaatgcataccacagctttgcggagcttgcacatgacttgaaatttatagacggaagaaaacgcctgagccttatatggggaaggatcccttatccggagcagagtacaaaggacaaactgttccggatactgctgacggtaaccgttctgcttgcggccgcggctgtcttactgcttctttcacagctcatattcggggacataccgctgtttcgtgcgttcacttctgctgtcagaaggatcggcaccgaatcactgcttaagtaaggggggagcgctacgaaaaaaggaatagatcttaccccgagggatgagaaggattattaccgtattggtttgtggcttgtgagtaagaggtttgcgctgttagtcactgtcatcgtatgcgtggcaagtctctggtgtgtgttccggtcttttccggcagcttcggcgggaaaagaacaggggattccagtattccggtacaattcccttccgcttaagttttacaggggaaaagccgaggtgcttgctagatcaggatatacggcatacatcggacaggtgagcaagggggcggcccaggggaaagggacgctgtatacgaaagaaggaaatgtccgttacaaaggcggattttccggaaatgagtatcacggaaagggaacgctttaccgggaaagcgggacgaaagaatatgccggcgcgtttcaatatggtgtgaaacaggggaaagggaagctttataatacagcggaagagcttgtgtacaccggcagtttccgcaataatgccatcgtctacgaacaactggcagggatcccgacagaagaagcggcccgtaagtataccggaaagcagatcctgtatgaactggacggccggatctgtgccgccatgccggagatacatgccgtatacagcgccaggagcggggagacatacgcagacggcctctggatgacaacgggagtctatgtattggcagaacaatttgtgacagatgagggaaatctgaaaacagtaaaagaactgaaaacatattttggcagttcagagtatgaaggcacgacaccgctgcagtttgaggatgttgcggccatgaggcagctgtcttcctcctccgcgaaaaagtacgaaacagaagttttcgttgagacagaaggagaactgtcggatgccagaacagtgaccggttacagccgcgacgcagacggttatatctatacatttgaaaaagaaggattttgctacacattttttacatacgggaagaacggcggatttgggatgtacctcatagaaaaagaggaatagtcagatggggagagaaaagtggaaaaaagacggaagagatttctttgtattttatgttctgtctgcatatcagcaggagtatttgtccagacgccccggacggccgaagccggacagagagtgctgacgcttgcccaggcgaagaagcttgcatacttaaacagcgcggattatacaaaggtaaagagcaagataaatctgcagaagatcaaatatacggaggcggtaaagtcgatcgcgctgaagcagaagaatatgctcacgttccggtggtctccgcttcttaaattcaagtttccggagcggccggacatggctgaactgtatgactggctctacaagccgatccagctgcagaccgctctgtctgagcttatgcatgaactgcaggatgtaaaatatgccgtggatgagaaggtctccaatttatatgtggcggcctatgcggcgcaggagaagatcacatttacagaggcgagactggacagtgcggacgggacactcaaacgcaacgagtggaaggtcaaaactggggaaggggcgcaggcagatgtagacaaaggaaaggcacaggtgaagaagttcacaacagatgtcagtctcctgatgcggcagcatgagacagcaaaaaagaagcttggcaatgcggtcggactggatctgtcgtgggggtatcgttttgagaatccatacgtaaaagggaagatcggacgcagtatgctgaaagaactgacagaatatacgctttcccgtgaccagggctgttatgaggccgggttaaatgcgcgcgcaggacttatcagcatggaattgaacgaacggatgctcaaagtgaaatataaaaagtatatgccctatatacagagttatatcaaccaggcccgtcaggggcagaagatagataaggatgcgttcaaggcatcctatgaccagttcctgcatgctctggacagccgatggcagggaaactttaagatattgtttatcaagataccgaaggaatggctgaaaggcgcgctggacggggtgcggtatattgaggatgatccttacgtcatgtacacgcaggtgctggaatatgcagaccttaagctggaacaggacaataagaaaaaagaggtggaggaggcggtatcggatcgatttgaagcgctcatcacttcaagaaacgcgctggacgccctccgggagactgtgacagatatggaaggaaagcttcagaagcagctggcgctgaacagacagggtaaactttcctttgaagagttgaacgcccagcaggaagaatacgaagaatatgagatagaaatgctcgatacacttgccgattacagcagccagctctattcctttgaccggctcacatgcgggggaatcacaaaatatctggaagagggaagtctgtcggccgatacggcggcaggaggcgaaagctatcttgtgcaggaggatggagaaggcgcttactatacgctggaatcgaggatggaggacaatatcttcctcctgcacgtgcgtatcccggaggacttcaaggtaaaggtcacggactatgaactgtgggtggacgggacacaggtgggggaccggacgaaggccggagatcccttgaagcatcttgcccttacactggatgatgtccaaagcgcggccgtacgcttttataataaagacgcctttgtagatgaatgtgagatcgatccgatggtctcccaggggacactggatataaaaggagagtataaggctgcagagaaaaaggcggagaaaaaggcggcggactattcctatacataccgttcctccaccggcatggcggaacttaagatagagccggcagcgggagaagggatcgcctactaccaggtgaccgaccgggacggtcaggcggtatttgaaaaaaagctggttccggcaggagagccgttccgttacctggaggttgcggcaaaggaccagaagaatctcaggataacattctatgatgcagacaaaaaggaactttatacgggagagtttcagccggatacactgcagatcacagtacaggaggaataagggatggggagacgaaagaaaaaaacagcggcggccgtgaccgcgcttctcatcaccgccggattcgttgtatggtttctggccggcagaagcgaggcggtattcagggaggaggacgctgtccacatcgatccggataagatcgaacagtcgacgcttatcgtaggaactcatctgatatacctcggttcccttaccgataagctgtacgagactgcagccgcgtcggcggaggaatccggacagacagatatatactaccgatcagaactgggggacggcaggtggtacgccgtcaatgatgccggatctttggaggatataagcgaaaaaggaaaagaaattccaaagtccaggataaagaacctatttttgacgcatcacacaaagtccgacggatatacgtaccgtctgaaagacaataaaagggtcagtgtatatgagatcaattctccttatgatctggagggaatgaaagagctgtccgcgctttcacgacagaaagagctgaatggaaaaggcgcggaggtgttccaggccaaagtaaaaaacaaggtcacaaaatggtgtgacaaaagccttgataaattaaataaagaatctgtccggctcaggaccgccggggcggatgccgagtggcttgatatgctggataaggcgatgggaaaggtagacgacctgcgccgtcatgaagtatataagaaagtgaatgagaaagttcagaagcttcttgacgatgaggatggtgcggatgcgggatacaacgaagcgctttccgggacattgactgagctgtcggaccgtctggccgagacggacgggaatatgctgaacatagatccggaagcgatcgaggaggaagaggagtccggggatgagccggaggaagaggaaccggataatgagccggaagaagaggaagaatttgagataacagttatggcagagatggaatctgagctcatatggcagtatattcaggacccgaccgaccgtattctggcggatatggtgacgttacagcatatcatggacggggtgagcacagttccgggagaagaggcagcatttttgaaaaataaactgatcccggccgcggaagcggcatatgcccgcaacccgactgaggctgccgggaatgagctggaatattacagaagcgaatggaatctgcgtgaaaatggcacagaggagtcagggcaggagctgaggcagatgtatgatgagaaagcagagcttgaggagaagagactggcggcgcttgatgaggaggacctgacggaggctaagcggatcgaggcgctcatcgatgtgaagagcaaagagataaaggacagagaggacgccgtttccagggagactgcttccctcataaagcagaagacgggactggaagcagagctttccgaacccgggacggaggaagagaaagagaagatccaaaatgagatagacaagcttgacagccggatcgccgcccttggggccggtgttgatgaaggcacttccacagccaggatccagaagatggcagaggaggcggcagaagcaatggaagaaggggcggacggggcagccagggctgcggaggcagtggatgggatcgaagctctgtgcggttccaatccggagctggcaggaagcagtctcaggaatctgtatgaaaagatggcggcaaagaaatatctggacgacacgaagatatatgacagcatacttgacagtattgagacggctctggcggaaaatatgacggtgctggacggtgaaatagatgaaaaggaggcagtacagatcatggaagagacggctggcaaggataagacggccgccctcatggggctttccatgttcgtggagcagacagcggacgcagggcttgagaatctgctggaaggaaaagcaaaagcctgggcaggggaagaggatgcgtatgtatttgccagactttccggcactgcggggatccggtacgctccggctgatgtgacggcccgctatgcgtctgtccggtatgtctttaatgacaataaaaaaagagcaacgctcgcttccagaaaaacgtactatcagttcactgcttttcagagcagcgttataaggggacctgaggaacagaaagaaaaactcagctctgcggcaggtttcaaggggaccgtctatataccggaagattatgtgaagcaggaatttgggtgtgaagtttatgatataccgggcaccggttattgtattcttatagatcaagacataacagataaggcagcagaagtctgcgatgcactgttagagaaaggagagtaaagagatggcagattatttatcaccgggagtttatgtggaggaatacgacaattctcccagaggagtggaaggagtcggcacaagtacggcagggtttgtcggtatggcggaaaagggcgccacatcaggaccgcctgtgcttgtcacaggatttgcggacttcacgagaaaatacggaggatacttaagtgaatttacacacggcgaataccggtatcttgcggggactgtggaacagttttttgccaacggggggacccgtctgtttatagcgcgtgtcgttccggaagacgcaaaggccgcggaagggacggcgggcaatgtgactttgagggctaaaaacgagggggcgtggggcaacaagatcaccgtgacggtcaaagcttacgcgaagcgcaggatgcagcttcttgaaaaactgaccgataagaaataccgcgccaaatccgtctccgggtttgaggaaggcagtattgtcaaagccggtgaggcttacaaccggatcacagcgatccaggggctggaggtcacgtttgaggaagcctttatggaagatatggcagatgacagccttgtgccggagaaagtgctttatctggcagagttccaggcagatatccgctgtggtgacgaggcggaagtctttgaagaacttaacatgaatcctttgtccagaaattatgcgccgtccagactgtcggccagcagcattgtggaggcgtccgccgcactgccggaagggataaagaacccggcggagctctttgcgggggcggaagaagcagtgatcacactggaaggcggatcagacggaacactggaggaggtgaatgacggcacgtttatcggaaagaacgaacaggccggcaagcgtaccggcattcaggcatttctggagaattcgttcgtgagtattatggcggtccccggtataacgagcccggaggtggtcgtatctcttgtgaaccattgtgagaatacgaagagccggtttgcggtgatcgacatgccgaaggatatgacggaccctgcggaactgctcgcctacagggagatgctggacagcacatatgcggccatgtatcacccgtggatccaggtgtttgaccgttcctgccagaagccctcttactttccgccatccggcgcggtcgcaggtgtatatgcgaggacagatacggcgcgtggcgtacataaggcgcctgccaacgagacgatcgcctgcaccggcttaagtgtcaattatgcaaagggggagcaggacatactgaatcctgcgggtgtgaacctcatacgcgcgcttcccgggcagggaatccgcatatggggagccaggacggccagcagcaacgcgtcatttaaatatgtgaacatccggcgcctttttatctatgtagaagagagcatcaaggcgaatacaaactgggtcgtgtttgagccaaatgatgaggcgctctggaacagggtgcgcacatccatctcttcttttcttgagacattgtggagaaatggaatgctggccggcgcctcggcgggagagagcttctttgtggatatcgggccctcgacgatgagccaggatgacattcagaacgggcggctcatctgcaatatcggtatcgcgccggtgcgtccggcagagtttgtcatattccgcgtgacacagaatacggcggagtcaggagcgtaaatagaaaggacaggaggtaaaaaattatgccaggagaagaaaacggaggatacagctatcctttgaccaatatgaacttcctcgttacattcggggagaatttgacggcggcctttacggaagtgagcggggtggaggcgacggtggaggagatcgaattccgtcaggggaattccacaagccttgcgcccgtaaagataccggggcttatcaaacacggcagcgtgacgatgaaaatgggctacacgacagacaaccagctcataaactggatctataactgtatcaaagagcagcgaacgggatttgcacgtaaggatgtaacgatcgagcttatcgatatccggacggagtcaccggcgcagccggtgcagacagacgcggcccggccggcgtggaaactgaaaaatgcgtgggtgacaaaatattcggcgccggatctcaatgcatcgggcaaagaagttgccattgaatcgatcgagcttgcttatgaagaactcgtgactccgggccgcgcagccgcaggaggcgggggcggagaatctggcgcagaataaggtctgcgccgcatgacagaggaaaaggaggagtgatatcatgcagaccgtatatgagtttacgctgccgaaaggatatatggacgcccagggaggcatacacaggaaagggaagatgcgcctggctacggcaggtgatgagatacgggcgacgagggatccgagggtcgtctccaacccgtcgtacctgacgctcgttgtactttcctatgtgatcaccgagctggagggcgtggagatcatgacagcgggcgtcatcgagcagctttttacggcagaccttgcctttcttcaggatatgtatgagaggataaacgacgcggagccgccccggacagtggtgacatgtccggcgtgcggacatgtgcatgaagttccggtaaattttacacgggagggataaccctctatccggaagaagaactgtacagggaaatgtcctttatcgcttattattaccactggagccaggaggaggtcatggcgctggagcacagggagcgcagacggtggtgcgatgagatatctgtcataaacagaggacagagcccgtccgcgggaagagaaaaaagtatactggagtggaaactttgatgagtgatatggtaatgaacatgaatttcctgctgacccttggagagaaagtgatcccatgcaggagtatccacggttttcacagggagtgtgagcaggagtatattcaggagggcggactcaacggctatgtccatatgcgtccgaagccggcgtccgctccttcgacacttgagatcgagcggtatgtgacgggagactttgaagacgcattgccaaatggagaatgcctggataaggatctcatactgcaggtggggatcggcagggagggggagaagagtccctccatgaagctgacattcaaaggatgcaaagtgacgcagaaaagctacggagaaataaatgcggaaaagggcggtatctttgtggagacgacgacggtcagctatcaggaactgaaagtgggtgacaggatgtgagaacaacggaagcatttaacagaaagatcacggtactttatgaccgtgacatccggcgcatccggccaaagaaactgtcgcacttaagcgacacgtcccaggtcgtacaggtgaaggagggcgatgtgcggtattcgcatcagatgaatctgcgcgtggatgagcggccgcatatcacgctgaagctgcttgccggacttacttatcaggaagagctggaacagaggtcatatgtgcgccggatgaaaaaggctgagcttgtctataagaaccttgaacagacggcggatgcggccgggctcgtcagagagctggaggcaaagaacaggacacaggtgaagataaatgagatgaaaaaggagctcgtccgggagagtaaagaggaagtccactatattgtacgaaagcagatgcaggagcagaccggagcgctgacggagaaagtgtaccgccgcctggaacagaagcttcaggatgaaaaacggcgcagagggctttaaaaggaggaccggatgtggtagaaaaggcctggatagaatttaaagatattgtgacagacagcggggacggcacggtgttctatgtgccgttcaatccgacagaactgaactttgaggcggggtcggagaaagatgaggaaaagaaaactggcgcgcgcggaatgaatgtgcgcctcaggatgaagcttatcttcgataaaagccttgagatggagagtgtgcaggaggatacgcagcgttttctcagcgcggccagagatcctttgaaaagacgtgtgctcttccagtggaacaaaatattttttgacggactgctggagcggatgtccgcagtctatgagatgttcacggaagacggcaatccggtgcgggcaagagtcgatctgacgatcgccggcagaagcggcagtatggccgaggaggaatggtacaaagactacagagaattatttttctcaaagaggtttgacaaatgttaaaaaaagcagtgcttacagtaccgggagaaaaaggtgatttccattccctggaggtgcagtataacccgtccactctgaacctgtcggtctcagccaggtcagccgcttatgaaaatccgcagacgcataagatgcacgatcaggtggaccagaatacggacagcggcgagcttactctgtcttttgatctgatcatagatgatgacgggggccgggatgtgagaaagacgctccagggatttctcggtatgatgtttcaggagagttcgagaaaaattgccttcgggtggggagacatgaattttgaaggttcgctggagcacataaacgcttcttttgacatgtttgacagcaacggaacgccggtcagaggaaaagtgcatatggagatcgcacagcgggactttaaaggggtggttaatgatgaattacgacagccttaaaaatgtgtacgggaactttcagctgccgaaggcagaggttttagtggaaggaaaaagctttggggagaacagggcgggaatgcttattgatgaggtgcgggtggagttaagctgtggatttgaagcggcagaagctgtattttgcatcaccggctgtgtggacctggacaccggaatgtataaaacaaaagagcttaagccgttcatactgcttggttcttatgtgctgatcaaaatgggataccggtccgggacaaaagaagtgttccgggggtttatctcacgcacggaatttgtgaatgaggacggcactccgtctgtggaggtgacttccgtggatgtgaaaggtattatgatggcaaatacgtatgccagacagctgaaggcgagatatgtcagcgatgcagtcagagagctttttgataaaccgtcctatcaggaactgtctgcccggggcatcatcgggaagctggacatcccgcctaccccggataagacaagaggagaggcagataaaaatcttgtatccatagaaatggtgtcggaaagtgattatgagtttgccgccaggtgggcaaggagaagcggctgtgagttttatacctctctagggacagtacgtttcagaaaagcccgctcggatgaaaaaacttattttacgctgggaccgggggacggcatgacgcagtaccgtatatcgtatgatgtgagccctctggcgggcaaggcagagatacgggggatggaagacggcagaggagaggtcataaaggcaaaaaagaagataagccgccgcatatctcttggcaattacgccggaaagcttgttgaccagtctgaaaaaatatatatagacagcacgctgcgctcaaaagaagaggcggcggagcggctcgaatatctggcggaacgaacggcataccggttcgggacatttgaatgtgaatgtgtgggagtgccggaacttctgccgggaaggtatatagaagtagaggggcttggaagtccggcagacaaccgtttctatgtggaagaggtcctgcacagcatggacagtctgtccggctacaggtgccgtataaaaggaagaacggataagttaaaagactgacggaggaggagcatatgtctttttatgacgagatggaagcgatcagcatggggcagatgagcaggatggaaaacgggggtgaacggatatatggcgtcgttcttggcattgtagtcgagaattacaaaaaggaactgcccggtatggtacaagtacagataccggtccgggacgaagaaaattccatataccggtgggccaaaacagcccatatgtacagcggcagggaatgggggcagtacattcagccggagatcggagatcaggttctgctcgtctttgaacacggcaatatcgagcgtccctttatcatcggttctgtgccgaggaacaacgacaagtttatcagccagtcttcaaaagagcagaacgagacgaagcggatcgtctccaggcatggaaatgagatctccattgcggacgtcaaggacagcgacggggaaaaagacagcatccggatacagacgagcggcggaggacagagtatttctcttgaaaatgagaaaagccagatcgtgataaaagcagaagaaaagcttattttcaaggtgggcgactctatcactgtaacattgaacggaaaaagcggaaaggtcacgatagatgccaaacaggtaaatatcagcgccagcgattccatgaagtatgagacggacggggcagccactctgtccggccagaatacggtcataaaggcatccacaggactgaagcttgagagcaacgggatggcgtcggtgaagggcagtgcagtgaacatcgggtagacagggcatgcgccgtcaaatgagccggtgtaagtacaggaggaagaggatggaggagaagatacagctgggaagagggatgaaatttcctccgcagatcgatctgaccacaggaagattcgtgacagcggatgaagatcagagtgtgaaggattcggtgtatctgatcctgatgacgcagaaaggggaacgcccggtgagaccggagtttggcagcaggatattatcttatccgtttacggacacaaacccgacgacgctgcacgtgctggaacgccaggtgaaggagacgctgctgacacaggagccgagaatagcggacgtggaagtgcagactgagttcaggtcagaggaagcctgtctgtacatacatattcactatacactcgttcagacaggggccgaaaacagtcttacgatccctatggagacggcataaggaggagaaaaaagcaatgttggatggaagaagaaaaaatgagatctgcgcgcagataaagacacttgcctcctcgtacacaccagagtggaatttttcgcttgaaaagcctgatacaggctctgtgctggccggtatatttgcagaacagctggaaacggccatacaggagtataatgcgctgccggccagatatgaggaagagctggtccggatgcttgggatcaccccgaaaaaaccggaaccggccagagccgtgatcgtcctggagccgtcggctggaatgcaggaagggatccaggtgccaaagggaagccggttttatgcggagagagcggagcgggacacgccggtgatctttgaatcgtcccatgatctgtatgtgacggatgccaggatcacagcggcatttgccatatcggcagatgaaaagacagtcgtccctctctgttcagaagagggagtcgtcacgtatccgctgtctctgttttgttttaagcctcatatcccatatacgaatgaactgcatatccgccatccatggctgtttcgcggtgagctgtcagagttttctgtctgttttgggagcaaagcggccgccgggcgtctgatggatgaagatgaatttgctttttcctttcttacggcggagggcagagttcctgttaagaagaaacggcagaacggcgcaagtattgatatctgtcagggggcagacagtgacacgcttgtcattgagcgaaagacggtgcaggaggatgagatttttcttccgtccgtttattttacggcaggccggcagtctgcagccctggattatatttatgacggagagcaggaaataacaggggatgcggcggcagttttcggggaggaactgtctttatacaaagagtgctatatcgggttcgacagcggccttattcaggaaggaactgatatttcgctggagttcggactggaattcaaagtgcgtgaggtgagagagaacgcgccgaaagaagaggaactgaagctggtgaagcgaaggcctgacccgaggcttgaagagcggacggcagacgtatatatacaggaagtgtcattttcctattacaatggacatggatttcgcagacttccggtcagcaggggatgctcaggcctcttttccggagcggacaatacgggcaggcgcgccatagaattttcctgtccggatgactggacggagatggagcaggagggctgcagaggatatatgatacggcttcagatcatgaaggccgactactgctaccaccggcccggaagacatcactatccgtatctgacaaacatgcgggccgtgtattcacagagagaaaaggaactctggcctgcacaggcggtgcgtgtgcagggaaagaaagagacggatgtgaccggatatatacagaggagaaagccattgcccgcttttctaaagttcccgtaccggggggcaagcatgctgtttggttttgaccggaaaccggcaggaggcccaataagcctttattttatcatcagaaagaatataaatttcagcggcatacaggctgtctttgaatattcttcgccaaaaggctttcagccgctgaaggtcctgaacaacacggaggatctgaaaaactcgggaactgttctttttatgcccccttccaatatggccgagatggacattgaaggaaagacacgatactggatccgcctgacctccagaagaccggcggatgtaaggacagtgcttcccatagcggagcatatctatatgaatgggatggaagttcttaatatcgagcggagccagccgaaggagcagtatgtagagcagatcgcttcggatatggcatttcctgctccggcatcccagcttctggatgtccgtatcgagtcgagggagagagggaggctggtccggtggagtgagacggattcttttgacagcgcggcttccggtgacagatattatgtagtggacagaagcggacagagagtcgtgttcggtgacgggcggagtgggaggattccgaggaacacagaaggacctgcatttacaatggagatacaaagctgtgacggtgcagagggaaacgtccccgaaaatgccatagacagcgcggcttttccgctgccgaacgtggagcggatatttaatccgcttaaagcgtccggcgggagtgatctggaagagccggacagtgtgaaacggcggggaagagtgctgatgggaaccggaggccggctcgtatccgagcaggattatgtaaatgcggcaaaagcatattccaatctggtagcgaatgcatggtgtaaggtagaggggcgccgcatcacgctggcagtcctcatgcaggactacgagtcgggcccccactccttcgggcagataaaagacagtctttcaggctgtctgcttatgatggcgcctgcgtccgtgaggaaaaaggatctgatcataaaagaaccggtgtttgtgaacgtgtctgtcgaactgtggatccgggtggaagaatggaaacgggcgctggaggagcggggcaggatactggaggggctgtaccgccttttccgcccggtgagacgcaatggccgcacggagccgggaaccggttatatgccgagggaatcccagattctcatggcagtgcgttccttttcacccgacgcgagaattgagcattctaatattaccgtgtcgtatgcggatgaaaaggggaggcacaggacagaacttggacagcttaaacagacaccgttcatggtgtgtgtaaacgggactcatgaggtgcatgtatgttagaagaattggaacaagtggtcgaagaggccatggcctgggcaggcatctgctcgcaggagtggacgaatatgaatccctcggatccgggggtcactatactggagaatctgtcggcgctccatctcgtacagaaggaggcggcaggacaggtgaccgatgaagcaaggctcgcgatcctgaggcttgccggatttacacggcaggaggcggaaaatgcccggcttctggtggcgccggcagagccgcaggaacctgcgtcgtttccgaaacatcagaagttctatgtgaacgacgtctgttttgagaccgaggaggcgctgcaggagcttcagggacgtcttctcggagtatatgtaaaggaacaggacaaatacagggaactgagggaactgaaggagggggtgcccctgaatgcccggccttttggcagccgcccggaggcgggcgacgcagtatatttcctctttcaaaaccttcccgtgtccggggacacaaagctgcggctgtatatacaggtaaagaagtccgtaaggaggaatccgttttccgaggaggaaccggtagaatttgccaggatgcagtggagctgtcttggaagctccggctttgaagacattctttttcaggacgacacgcacggattcctgcagagcggagagatcagcctctgtctggataccatacagccggtaaaaacgcgggcgggcgcgaaggaaggatatatgctctgctgccgtatcgcggaggctgattacgacagagcgccggagatcgccgctgtgtacggaccgttgtttccgctcatacagagggatacatggtctttttcggctcagtttgacgggggcggggatatcagattgtatcctgtttttccggaggaaatgtttcttacggtatatgtgagggagccgggaagcgcccattacgtcatctacggagaggcgccgggacgggaagcgggaatatgctgcgccaaggatcgcgcggacgggcccggaaacgcggcgcatggcagatattatgtcaggacaaaagggcaggatggggagatccatatccggtttcaggaggaggtctttggatacggacctgcgaaggagccgggggcagttaccgtcgtctgctgcaaccggcatatgatgctgcaccgggagcttggcatactggaagggtatgacgatcagtatgtggactgtcctccgggcggggaggcagatgagaaggcggtctgcctcggagtgagacgcagggacggcgcatccggcgaagcataccgctttttcccgcccggtatccaaagggaagacagtatatattacacttacgacgaggacagaagacagatctgtatccgtgatgcagggccgtacagagggtgcgaagcatttctgtcggactatgcggtgtctgtgtgggaggctggaaatatacgtttcggcaatatgctcgtatccgttggcggaaatgataatatatgcgtgaaaaacccggtaaaagggacagaaggacggcggaaagaatctttacacgatgtgagaaaacgcttcctgaaagatatgaaaactccggtcgcggcggtgacggaagaagactacgagctgcttgcgatgcaggtgccgggcttatgtatccgtaaggcccgcgcctattatgaggagcagaaggagcgtatatgtgtggtcgtcatgccgcggacagaggtatcatttcccgtcctgtcttccctttacagaagacatatttataattatctggataaacgaaggctgatcaccgacaaggtgaccgtaaaggagccggcctataccccggtgagcgtatatgtgacagtatctgtgagagaccgggaaagctgggacgtgaaacgggtcagacaggaaatagcagaagagctggatgacaggagaaacaggagaaagatagggcagaacatttcatttgaccgcctttcctccagaatacgctcgtgcccgggtgcagggcatatactggaactcaaggtcgttcccgcgggcgtgccgggcaggcttatccggtccggcgcggacatccccataccgccggacgccgcgtgttatccgggggagatcataatacgtgaggagtgacggagcatgaagagatattccatagacggcagatttacggcggatgcaggcagggaagcaaaacgtatattcctgccggtgacagacagtatggaaaagaatacagtatggggacgtctgcatgtcaaaatgcagctgccggcgaaagggctgtgccacgtttatgtaatggccggcaacgaaaaggatgacatagaacgtctgctgaacgacagggcggaatcggaagagaagaaggcggaactgtttgatacatatggcagaaaagcaggaacaaacagcgaaaatatgctgttgtacgaagtacagggccgttttctgtggatttatatagagatactctgttccgggagcggtgcggtatacgatatattccttgagaatccgggtgatgaatttatgcagatgtttccggaggtatatcgggaaccgggcggattttttcagcgctatctgtctgtgctgtccaccttataccgtgacatgcagcggaaaatagacggaagcgccggtctgctggacgaagcgtctgcggaccgggaccttgtccgtctctatatgcggtggatggggttcgacggagcgcgcctcgggcttacggagaaggaagaaagagccctgcttgggaacttgtactggctgaaccggcgaaaggggacaaaggcggccatcttgaagctgtgcgctatatttatggaggaagagccgatgatactgcttatggaggacagagaactgtatcttgcattcagggaggcagagccggaaaaagcgaaaaaactgtcaaatatactaagacggtttctcccggccggcatccgcgtccgtatcatatgcggccaggagccggcccgctgcggcgggcacttcttcctggatatcaacagcagcatagacaccctccccgccggcgcactggacaccgcccggcagtgcggccgcagcatcataatatagccccagccgcttcccgccgcccagacaggggggctgcccccgcacctgccacacctgccgcccagccaggagatctgtccccgcacccgccacacctgccgcccagccaggggatctgcccccgcacccaccacacctgccgcccagccaaggggtctgaccccgcatccacaaccaaccccacccacataccacaaggggtctgaccccacccacccggccacctaaatcctcacatacgaaaggaatccccctcaatatgacatacacagcaatcgcaaaagtcagcgagactataatgaataacttaaaggagcagctcgtcccggagctcgtccgctttcctgggcagatcgcgctgtgcgcgccgaacgagagggaaaatgccagcctcggcatttttctctacgatatacaggagagcgaatacctccgcccgcagacgatgatgaacgtctctgaaaggcagcagaaatatccgcctatatacatcactctattctatatgatcacggcgtatgcagaaggagatgtccggttccggtccgtacaggaagaacggatcctcggcagagtgatacaatattttcacgactgtccgttcgtgcttccgcaggagagtcagacacggatcgagcttcagcggatttccacggaagataagctcaagctctggtcttttccggacgagccgtacaggctttcgctatattacaaagtgtctcccgtcccgatcgagtccgcggtgacaaaagatgtggtcagggtcagggagcgcaaggtaaacatggaacggctggagcggcgggataacaacgggagatagaagaaaaatggaagatacaaggtatgtgatcgaagaaaagctgaaatatatactttggacagcagaggcaaaggaaagcgcgcgtccggatgagccggctgtctatcaggaacaggaagaccagatcttccgcctggaagaactgcgcacggccggaccgccaagaatcgtgaccgtccggggaaagcagggctgcggccgcaggacactcattagaaaagtggcgtcgcgcagaaggacgcagcttgtttttgcagatatagaggcgttatatcagtgctgtctggagaacgggagtgctgtatttgatgttctctccggtttgatcggggggatgaaagctatgttctgtctcatcgccggcagagaagaaagtgatgaggaacggtggagtgagcttctgtacggtctcgtcagagaaggaatatcatgttatgtactgacggaccgggatattgcattgccccgggaggggcgctatgagcaggctgaaataaggctcctgcccccggatatctcccagagagtgatgctgtgggattattttctcggcagatccagggtgtccggggaggtaaatgcggcgtttctggccggaagatatacattgaacgcaggcgccgtcgaacgggtcgtacagtcggcagggctataccgggacgcagaaggacgggcgctcaccgcggaaaaggacatcataaaagcggtggaaatgtaccagaatgacaatttcagtgagtttgccgtccgggttccgtcggcgtttacgtgggaagaccttattgtatctgaggaaacgcagatgcgtcttacggaactgtgcgggcaggtcaaatacagaagtctcgtaggcagccagtggggattttacgatgggaaaccgtatggcagaggcgtcagcgccctgttttacggaccgtcgggcacgggtaagacgatggcggcgcagatcatcgccggagaactcggacttgcgctgtaccgggtggatatgtcacagatgatgagcaaatatatcggagagacgcagaaaaatataagcagtctgtttgaccgggcaaaggaaatgaatattgtgctgctctttgacgaggcggacgctttttttacaaagcggaccggggtgaaagactcccatgacagacattccaacggggaagtggcccatctgcttcagcggatggaagagtacgaaggcatctctatactgacgacaaatttaaaggacaatatggacgaggccttcagacggaggatcaagatgatgatagagttccagctgcccgatgaagccgcgcggcgcagactgtgggagaaggcgctgccgccgaaggctcctgtggaggcggatgtggacctggacttctatgccaggcagttcgagctctcgggaagcgagatcaaggagacgatgcttaatgccgcgtttctggccgcgccggaaggcggcaagatagcggaccggcatgtgaaggcagcggtaaagcaatgctatctcaagtatggaaaactgatgcttccggaggaattggaaggaaagctgtagaaaggaggggataccatggcgcaggctactgttgacggcgcggtgctcacgtgcagtttcggcaccgtgccgtgtacgcttcgtgtgacttcgcagcagtcctgtcttgcgtgcggcagaccggcggcaacgatacaggacatggcgggcaaaacgaatataaccggatttggcatgtgtacctcgcttgcaaatccccaggtggcggcagctacagcagccgctctcggcgttctgacgccgcagccgtgcaactgtatgacagcggcgccgtggataaatccggggaaagcaccgctcgtaaagaaggttccgggccttcgcagtgacgcaaagctcatgtgcgtgaacgggatgggagtgatctcgatcacagcgcccgggcagtttaaggtgaatgtgtaggttacgccggctcaggacggcagaaaggaagtgtcgtatgtacgagtacgaagaaaaaagaaaaacgcctgtcaacagaaccgggatcccggaccacgtgaaagcaaagtttgagaaccgttccgggtattcctttgacgacgttaaagtgcattacaattccgagcggcctgcacagtttcaggcgctcgcgtatacgcagggacagaatgtgtacataggacccggacaggagcggcatctcgggcatgagctgggacatgtcgtgcagcagatggaaagcagagtcaggcctacgatgcaggtgaacggggaggcggtgaacgatgacccgggacttgagcgggaggcggacggctggtagaagcggaggggatcagatatgtatacgcatgggaggcaggcagatgaagaaaaaatagacgattggcttgtatctgtctgctggacaaaaagtaatctttttttcggtccgataaaaagaaccgatgacccggccaaggtacatccgggtgtgccgcagtttgacgctcatatgaagaaaggcagacgaatgagtatccgcagcgctcatataaagtcggcagtatttgatcaggggggattcagaagtgccgtttcttctgtgccggattatacagcagaagatattactgacgaagaacttaaaacggtactgcccggcgaaacggtaccggcgggaactgtcagagcagatctgctgggaaagacagatactgtggctgattatgtggacgatgaatggattctgtatccggcgccggcaggaggctcggccgaatctgatagcgttgcaaaaatcctggcgggaggggattatttaagaagagaagaatgtacatttaccttcgtgctcaaagataacagtgatgcagagataaaaacgggcgtaaaatactatggagacaggctgtacatagaggttacagcagcttccattgtgaactctgttgaggttcaatacagacagagcgattttgcggggaaaaatccggaggataaggttgttgtatttcttctggtgggcgacgcgccggtcaaggatgacgatgcaagcagctggagggcagagattccaatgccggaggactgtaccgtggggaacgcggtgttgatcttccgcaagccggagggaaatgagatacgcaaggagtttaagaacttgttttttaagagggaagcgcagtagttcagcatatgcggcacactggtattgcgggaaccgcaaaaacattttataatatgtaatcataaacaaaagataagacaggaggatgccatgagtaaccggctgacaggatggctgaaacacgggcctgatctcagggatgcttacttcatctttgcagatgacgtctttacaggccacatgacttacggacaatttacaacccttttaaaattttatttgttgatctatcggaggattttgatcgcagattcctttttggtcaacaatgcccatctgcacaggttcctgctggaggaaggccgggaactgcttgagaaaggtctcattgtatttgttttgcgctcggataaatcaaaagtaagcgatctgctgaatgattttaaagagagcaaaacattgaatgccggacttgagacagacaaagtaaagcgcattttagaccattacgatttcaggaagatgatcaagtgggataaagagaggatatcgcagaattttaatgataaaatctgcgcatctttgaacatgcttcctatttcagatgaagatgcacagaaatttgcagaagagctggatgctaaaaaagccaaggacttgctgacaagacaggtggtttatgattatctggataaacaatacgttccgtctgatccggtgaggcaggtgataaagaagtatacagatatcatatacagctttaacattccgaatgcgctccatgttgcctccgcatacccggagcggctgctttcaaatgaactgctcagcccggagaaggtatttttccaccttacagatgagaaagatatagaggcacgtctgctgcatgaaatcagttaccagtcggaggatctgatatctgaggatacgatatcgtgcgaccatccgctcatgttctatacagcggtgctgagccgtctcggcgccggggagatcctggcgttgagggagatagacagttttgcgaaatacctggacgcgttaaggaggaatgactctgaggaaatgaagtggtatttttataactactgccaggagagcaataagctggcagcggcgatgatctcgaaggattatcatgttctgaaggagaagggacacaagctttctatccgctcgaaagttgaaaacgcagcaaaagggatcatcagcttcgggcttaatttcgtcccgtcacctcacgaactgctcacgccgctggcggatacgttcataacagggggaatctctctcatcagccagaaggcgtcccatgcactggagaaagaatataacatcggtctgatcaacgcttcgcgtgaggcgcaaaagctggcagatcagaacaaacatacgatacttaatgagacggaagatgcttttcagttaaataaaatcagggagaatagaaatgaaagaagtgtataataacggattctatcaggtgtttgacgaaaagggaaggatcagaatagaatccgtaaacggcggtacggtcgtcgtgcctgtcaccgccgaaggcaaatatatcgttctgaaaatataccgtcccaatctgcagaaaataatgctggaatttccgcggggatttttagagccgggtgaggagccggaggcgggtgccaggagggagcttatggaagagatcgccggaacaggggatgagttcatttcacttggcacagcgactttggacagcggtatctcaggtacggccaatcatttttttctctgcaggaatgcgtcgtgtgatgttacaaggctgcaggaggaagaggggataaaggaactgctttttctgggggaggaggagatgaaagcctgtatccgcggaggggagatcatggattcttttactattattggttttgcaaaagcgctggtctttacggaggatcagttacaatattaaataagataacggggatgaaagaaagactttgaggaaacaaaacggacttgatctatgtcgattattgtagaatatcatagtgtgaaatatctgattatatgatacaatatagttaaattatgaaatataaaaggaggatagttggaaaaaacacaaaatgaggagggaaaaatatggcattgatcaagtgtccggaatgcggaagagaagtcagtgatatgtccggtaggtgtccgggctgcggttatccgattcaggaggaagggacaaaagagagtagtggtacagaacaaaagaccaatgacagcgatgagaaaaaaggtaaacgtggtagtaaaacaaagaagataatagcggcccttataggagcttcggttgttatagcaattatcgcgggtattggtatttcgagtaaaaatgctaaaatacgcgaacaacaaaaggcagaacagaaagagataataacttataatgaatacgttgataagcttaattcgctttattcacaagcttttatcggtgcttcagacgcagaagcaatatgcgtattaactggtaaagtttggacaaattctatctatggtaaaagtgatgaggaaacggataagtatacagcaggggccattgactttaatgctgcgatccagaatatatataatgatgaggagatcaagaaaaaattagacaatgtacgtaatattcaggaaaaatgcagtaattatatccaggctcttcaatcctgtccggatgaactgggcaagtgctatgacgcggcagtacagttaaatactgcatatactgcatttgcagagctggctttatctccaagtggaaatcttacatcttacagagattctgagagtaaaaaggcagaggaattgttaaacgcatacaatacattaggcgcgatgattccggctaaaaaagaggtgcctttatatgatgataaaggggataaaataaaagatgaatttgcgtttgaaatatacttgaatcaaaagcctgacaaattgccggacacggttgatgatacgatggcgaagattggtttgaattcttataaagacagtgccgtagtgtgcggggaggaaggaaccatcaactatacgatattatccggcacggtcggtaatatctgctggactgtcgaaacacctggggatacaacaccggacaagctgttagaaaaactaagagaaagatatggtaaggaaaatactaaaaaagataacatatacttatggaacaatgataaaaataaagacagcgttactttaaaggtcgagagtgataaagtaagcatatcctggctcaatataaaagaccaattgtaatctacatttttgtttgtcgtaagcgggagtgctcttttgcatattatgttttttaatgaaacaaatatagcattaagagcttcttccgttatttaatataaaatatggcataaagatataaattggaatgagttatagtatgaagaaatgaggaggataaacaatgtggtgtacaaattgcggatataaattagaagaaaacgcagaggtgtgcagtgtttgcggtacaaaggtacggaaaccgggagaaattccggaaggggcaattatgcaggagcagcaagcagcgccgattcaggaagaaagtcaggctccggaagagagccaagagcagggagagagtcaggagaagggagagagtgaggagcagggccgggaatattctgaagaaatggagcgcagacaacagggcggcggggaaaagaatgcaaaagactggagaggaatcttaaagagacgctgggcagaaatagcgcttgcactggcagtgttgatgatcatcgcatacataggcagagataatgagttagaaggaaaaattgctgaatatgaggaagagatccaggatttgcttgaagaaaatgaagggctggaggatcgggtaagcgagttgtcagatgaggttcacgaattagaaaatggcgccggagttcagctggtagaaatcagaaatgcatttgatgatcaaaagtggaaggatgtgatcgagctggcggaggatttgcatgataattataatgggtcggaggaagataaagaagcacaggagcttgcaaagcaaagtcaggcaaaaatagatgaagcggaggcggcggaggcagctaaaagggctcaggggtatgaaacagggattacatatgatcagctttccagaacacctgatgatttcatgtgggaactcgttaaatacagcggcaaggttgttcaggtgatggaaggagactatgcgatcagtataagacttgctataaatgacaactctgaaaccgtcatatatggttattatcaatcggatattgtatcaaaaaggattttggaaggcgaccatataactgtttacggccgttttgaaggaatagaaacttatgagtcaataactggaaaaccgataagtataccaaaaatttctatcgataaaattgatcagtagataaattagatgtaaggttatgagttttccttgaattatctgtcaaataatgttatgtttaatctgtatcagtatctacaaatctaattaataagggttttaaggagggagaatattgacgaaaaaacgaaagttgctgatactttcgcttttcctgtgcttgagtacatcacttgtgttcggcacggaaagcaatgcagaaggaacgtcaggggagcagacgtctgcagtatcgggaatgaaagatgagaacgcacagcgtctcaaaactgttaccggaatggatgaaaacggtaacgtttatgaagtggacgtttcaaacggaacgtttgagaatggcgggaatgcacagtatttcaggtcagcgtccaacgaacttgtcgttaactttaatacgaagggaaatgcagtcacgaattatacggaggcagcatccggcagcgccggttatacgaacggtgcttatggggctgacggggcatatctcggcatggagaacggcaaggtgaaatttatgatgtcaggtgtcatagggcttgtctctgccagcgacgtacaggtggtgaagctttctgatacagcggtcgtcagcggttattatatatccggcggaagattgatccacggaatcgtgggcgatatgacgacaccgggatatgcgtcgaagctggacaacggggcggcgccatcgtatctaaaaagcggtactacatattacagctatgacggacattatttttacacgaattatggaacgatgattacggattatcagaataatacgcgctcccattccgtaaatgcaaacaatccatattataattatttccagtacctgccactcagaagcaagacagagtacagcgcagcgcagcttagcagcgtcatcaacggcaggctcacttcttcatcgtccaagatgaagaatactggaacgcagtttgtgaatcagcagaacacatacggtataaacgcactcgttatgaccggtatcgcggccaatgaaagcggctgggggacaagctcgatcagtcagagcaacaataacttgttcgggttgaatgcggttgacagctcgcccggtaccagcgcaaataaatattccagcgtggatgagtgcatccgtcagtttgccaacggctggatgtccaggggatacgtgtatccgaaggactccaggtacagaggcggatttcttgggaacaaggccagcggcctgaatgtaaagtatgcgtcagatccgttctggggcgaaaaggcggcaggtgtcatgtattcgctggatatatccggcggaagtaaggattccggcagatatacgatagggatcaaggatatattatacaaaagcggcagcaacctgaacgtgaggaactcgaacagtacctcttcaactgtcctgtataatacagggattcattccaattatgcagtgttactgaaggaatcacaggcgtcgggttctttttacaagatacaaagtgatgctgtgctgaactcaggcagaactgctgtgagtacaggagtcggtgaatataattttgacaatatgtatgcatttgtatcgtctgattatattacagtcgtgaacaagggcagtgatacggcggcgccgaagaagctggaatccatcagcataagtacaccgccggcgaaaacagaatatacagaaggagagaaattcgatgcttccggtatggtcgtcaaggcgaaatggagcgacggtacggagagtgatgtgactaagaacataacctgtccgtcagaggctctggcaaaaggcacggtaagcgtgacggtacaatatgctgcagatggggtgactaagaccgcggtacagaagatcactgtaaaagaaaagatcacggtgacagaagtgaatattaacccggcctctgttgagttgaaggcaggtagttcaagaacattcggggtagcagtttccgggacagggagtcccgcccagacggtgacctggagtgtagaaggcgctgaaagcgataatacgaagatagacagtaccggaaagctccagcttggtgccgatgagtcggcggagtgcctgacggtcaaagcggtgtcttccgcggatacatctaagtatgctgaagcctctgtgaaggtgatcaaagatgagataacagaaccaggcacagagattccggattctgatactccggacggagatgaacaagagtttgatccagacccggatgcatcaaagaatgacggttctgaaaataatgaaaataaaacagcagaagtaataaatgaacaaaatggtatcagagtaagcggaaatattcctgccgatgcagtgcttaaggtagatgtcatcgataaaagtggtaaagaatacgctgcacttacagaacctgtgaagacaaatactatccttggtgtctatgatatcagtcttgataaagagcttagaataaatgatacggtagaactctgttttaatgtcgatatgagatataatggacaggaagttttggtgctgcactatacccaaaaagatgataagaactatattgaaacatataagccaacagtaacggaaggtattgtgtcgattgaagttaccggtttttcaccgtatgttattgcattgaatgatgcaggtgcaaatgtagtaaaagaagatgaaaaaacggaagttcctgaacgtgctccggcaaacaatgcacttttgcccggaaatgaagacgcaggacaaggagaaagcaataatcttccaggtatcgttaattcttcttctacaggaggcagcacgttatccgcagatagtccgtcaggattcaaatctgaattgcagcaaaatggtggcggacaatctgcacaaggttcagaaacggatgaaaaagcagcaaatggcacggataaaaagactacagaactgtctgttaagacgaaagcagctaagacagcagatgaatcaaagattgtgatatggggattactgcttcttctttcggctttggtcactgcacttggtatcgaactgagaaaatttataaaataatgtttcagggcaggaggaatcctgccctgtttgttgctataaacgggagattagtttataatgagtacagtaaatgtttgagtggtctgaacgagttataggggaagtcgaaatctataaggaaagttagagtctatggaatacagggaacagcttaaaattattaaatcacataaatggaatgaaaaaaaaaggccgggggggcaccccaggaagaataacaagaagagaaagccgggaatagtatacagatttatatggttcttgcagttgtttttttctgttttttttcttgtatctgtttttatactaggtatctttccttttaaatatcttattttacttgtaataatagttgtgctgcttttggtaatgacacggtttatgcaggacaggtcttgcaaaagccgtaaaaggaaaagttttggcaagggagtatgtgtttgtttaagtgtgctgtttgctgtatcaggattttatgcactaaagggaaataatgcgctggataagatcgctgccggagaagaaagtggaaaatataatgcagagcatggaattgatgttacagacagtcccttcaatatctatataagtggaattgatgtgtacggagatataacacagaaaagcagaagtgacgtcaatctcatagctacggttaatcccagaacgcacaaagtgcttatcacgactaccccaagggattattatgtaactattccaggtgtatccggagagatgtgtgataagcttacacatgctggtatatatggaatagatacatctatagcaacgcttgaaaatctttatgacgcagcgatacctttttatttaagagtaaattttacttccgtggaagaaattgtagatgttatgggaggagttgacgtagaatctgagcttgcatttactacgagcgaggattcgggtcttgtgatggatgtgaggaaaggaaacaatcattttgacgggaaagaggcattagcttttgtaagagagagacagaatctgccaacaggggataaccagaggggaaaaaatcagcaggcactgttgactgcgttgattaaaaaaatgatgtctccgatgatattattccgagccaacggaatgataaacagtgtctccggaaattcagagacgaatatgtcagagaagcagatcaagtcactaataaaaatgcagctgaatgacgggaaaggatgggatatagaatctgtggccgcaaccggagatgatacgggcaaacaatggtgctattcttacagcgatgcgcccttgtatgtgacagtaccggattgggggagtgtggaggatattaagggtaaaatagaaaagataatgaatacagggaggtcagtgaatgagtaaagcagcattagtgatcatggcagctggaatgggcagcagatttgggggaggaataaaacaattagaacctgtgggaccaaatggtgagagtattattgactattctgtctttgatgcggtagaggcagggtttgacagagtagtctttgtgattcgtaaagatttggaaaacgtatttaaagacgtggtaggaaatcgtatcgagagtgtagtagatgttgcgtatgcatatcaagaaatagaaaacatacctgtacagtttaaggagaaatttaagtacagaaaaaagccctggggtacggggcaggcaatattgtgttgtaaagatataattaaaacaccgtttgtcgtaataaatgcagatgattattatggaaaagaatcatttattaaggcttataagtatctgtcggaatcagaaaagaaaaggtcagcagatgtctgtatgatcggttttatattaaagaatacacttagtgacaacggggcggtgacaagaggaatatgtgcggtgggaaaagatgggatgcttgaagacattgtagaaacacatcaaatagaaaagcgggggagcaaagccgtatcatttgacggtaatagtgaaaaggagattgatattgaatcagtagtatctatgaatatgtggggattgtatcctcagttttttgaattgctagaagagggcttcgaaacatttataagcactatggaagaaagtgatttggaaggtgaatatttgttgcctattattataggggacctgctaaaacagaacagaatcaatgtccgggtcttacagtcacctgatgaatggtttggggtaacatataaggaggacaggagatcagttgtggaagcaattaaaagtctgatattgcaggggagatatccgaagaatctatatgatttgcagtaggttaaaaacaatagagatttttgaagtattatagtgggaagggagaggtttgatggagaattactatgttcatgaaagcagttacatagatccgggagtaactattggaacaaacacaaaaatatggcatttttgccatatacagtcagggacggttattggagagggctgctcattaggacaaaatgtaaatatatcaaataatgtgattatcggaaatggtgtgaaaattcaaaataacgtatcagtatatgaaggtgttgaattggaggattatgttttctgtggtccttcaatggtttttactaatgatctgacaccccgcgcgaaatatccaaaaggcagttctggttataaaaagacgaagctaaaggtgggagctacgataggtgcaaatgcaacaattgtttgcggacatacaattggccggtgggcgatgattgccgccggtgcggttgtgacggtcgatgtcccggattttgcattgatggcgggtgttcccgcaaagcagattggatgggtttgtgagtgcggtaacaggcttgatgagaaacttaaatgcaacatttgtaaacgtgtttataaatgtgtagataaagagggcagacaatcaatgagaatacaagagaagtcataagtcagagacaggaattatataaatagatacttgtcactgccggcgcagggtttgatacaactactaatggaatgcagggggaaagttatgagagaatggattaagagaataattgctatttgtgttattatggtggtcagttgtaacttgattattgtttcttatgcagcagaggcggatatcaatatcccggataacgaacatgttacagcaaatgaagataagtctggtattaatacttggcttggcgatgtgtctgcgggtaacagaacatatttagatgaaaatggagaaaaggtaaaaggactctgccttatagaaggaaaaacatattactttaatccagatggaaatatacagacgggatggcagacggttgaagggaaaacgtattattttgatttagaggctggttttcgtctggaaaacacaactttgactattggggataaaacttatgagtttgataacagcggtgagttcaaagtaatagaaaatgatgcggggatagtatcaactgataaggcaaaaaatgaaaatattgaaaaggacagggtggagaataagaacccagagccttcagcggatgaaagtaaagaagacagcatgcgaagtggtgaagttaaagcgggctgggaggtgaaaaatggaaagaagtactaccgcttatcagatggaagcctgcgggtaggctggctgtcctttgggaagacatattattattgcggaagtgatggcgcagtagtgacaggaatacagaaaataggcggcaaattgtatttttttaacacggatggagtgcgtcagacaggctggataaacgagggagggaagaagttttacggactgtccgacggaaccttgcgggtagggtggctgtcctttgggaagacatattattattgcgggagcgatggcgcagtagtgacaggaatacagaagataggcggtaaattatattattttaatacaaatggagtgcgccagacaggctggataaacgagggggaaaagaagtattacggactgtccgacggaagcctgcgggtaggctggttgtcttttggcaagacatactattattgcggaagcgatggcgcagtagtgacaggaatacagaagataggcggtaaattatattattttaatacaaatggagtacgccagacaggctggataaacgagggaggaaagaaatattatggattgtctgacggaagcctgcgggtaggctggttgtcttttggcaagacatattattattgcggaagtaatggagcggttgtaacaggcccttatgggattggcggtatatcttactattttgacagcaatggaatcaggagaaatgcacccgcaggctggcatacgattgacgggaagaagtattatggccttccggatgggcaatatcgagtgggctggctctcatttggcaaaacggtatactattgtgataaaaatggagcagtggtaacaggcccttatagagtggatggaaaggtatattatttcgacagcaacgggatcagaagaaacgcacctgctggctggcagaaatttggcgggaagaaatattatggtcttccagacggcctttttagagtgggctggttatcttttggaaatacttattattattgtggcagcgatggttctgttgtaaccggattccagaagattaacggcaagaggtattactttaacaatgacggagtcagacaaaagggatggatcaaaaataatggaaaaaaatactacggactgtccgacggaagtctgcgtgtaggttggctgtcttttggaaatacctattattattgcagcagtgacggtgcggttttaacagggaagcaaaagataggtgggaaatggtattactttaacagcgagggagtcagacaaaaaggatggatcaggaataatggaaaaaaatactacggactgtctgacggaagcttacgtgtaggttggctgtcttttggcagtacctattattattgcaataataatgctgagactgttactggtgactatgcagtgaatggagtgttatataattttaacagtgaggggataatgcaaaagaaaagtggctggggggcttataaaggtaataagtattacttcaatccagctacgggctttccttatactggctgggtgacttttggacagacatattattatgctgacggtaatgggattatggttagtggttggagatatataagcggaaaatattattattttaatcctagtacaaaaataatggcaagaaatacaactattgatgggtatatgataggtcctgatggtgcgcgtcttccaaaaggactgggcgatatggttaagaaagcacagtcatattatagcccaacaggttatctcgtactggttaatagaagtacacataaagtgggagtctttacagggaggcgaggggcctgggtaaatctgttttactgggactgcggagatggtgcgccttctactccgacagtgacaggtgtgtttaacgttggttccagagggtattattttgattccggttcggccaggtgtttctggtatacacagttttatgggaattatctgttccactcagttctctgttataaagacggtcgtgtaatggacggcagagttggaatggctttgtcccacgggtgtgtcagactgcagatcagtaatgcgaagtggatatatgacaatattccatatagaacgacagtagttgtatattaaaaatatatgcataaaaacaggactgaaattctcaaataggaatttagtcctgtttttgtgaacagtgaacatgggtactgcaacatacagcgttgttacaacattagccgacgggaaggtataatatttgacacaggctttggctcaatatataatatagaagaaattctaaagaagggaaatatgtctaatacatataaacgatatttatgaagaagataatggtagtttttggaacccgtcccgaagcaataaaaatgtgtcctcttgttaaggaaataataagaaggaaggataaatttgaaattgtagtctgtgtaagcggccaacatcgagagatgttaaatcaggttttggatgcctttgaggtcagaccagattatgatctggatattatgaaagaaaagcagactttatatgatattacagagagtatcctcaggaaaatagaagatatcctgtcagaggaaaaaccggatgtcgttttggtacatggtgatactacaacaacctttgttacagcgctggcggctttctatcagcaaattcctgtagggcatgttgaggccgggctgagaaccaataatatatattccccttatcccgaggagtttaacagacaggcagttggtataattgccagatatcatttcgccccaacagagactgccaaaaataatttgttaaaggaaggtaaaccgtctgattctatttatgtaactggaaatacagccatagatgcattgaaaaccacagtatgtgaacaatatagtcatgaactgctggattgggcagagggcagcaggcttattgtgcttaccgctcatcgaagggaaaatcttggaaagccgttggaacatatgttcaaggccatcagaaagatagtggatgaatatccggatgtcaaagtggtttatccgattcatatgaatccattggtaagaggaacggcttccggcatattaggtgatcaggaaaggattcgtcttgtcgaacctttagaggtgatagattttcacaatctgctgtctcgatcctacatgatacttacagacagtggcggagttcaggaggaggctccatctcttgggaaaccggtgctggtcatgagagatactacggagagaccggagggaattgcagccgggactttaaaattggttggtacatcggaagaagttatatacaacgaatttaagaagctgcttactgataaggacgaatattataagatggctcacgctgttaatccttatggagatggtacggccagttcccagatagcagatattttagaagaaaccttgtgaggagaataatatgaatattcttgtattagttgaagattatccgaataacgacggtaaggtagctctgtatttcgcacatgccagaaatattgaatacttgtctcagggcattgatgtaacagttcttaatttttccgcacagaaagattatgaaatagacggagtaaatgtaatcacaatagacagctatataaagcaaaaagaaaagtggggaggattgttggttgcacatgcagcaaacgtccgtcatcactataagtttataaataaatatggtggcagatttgggaagtttgtttttttctttcatggacacgaagtgcttcggtgttccaaagtttacccgaagccatattcatatataaaagaggggagcgtcttctcaagaataatcaaggatatttatgatttgtttaaactgaaaatatggagaagagcctttatcaaatatctggataaaagtcactttatttttgtaagtcagtggatgcttgatgaatttgtcaagtgggtaaagattcccgagcacaaactggacggccataagagtataatctataactgcataggtaaacaatttgagacagaggaatatgatgtggcttcggaaaaagtttatgattttgtcagtgtaagaagtgatctggacggttctaaatattgtgttgatattattgccaagatcgcaagtgataatccagaactgaaattctgcattgttggtaaaggggagtattttaggcattttaaaaaaccggataacctggaactgcagcagcgttatttgacacataatgatatggttgagctgttgaataaatctaaatgtgctttaatgccgacaagaacagatgcccagggagtgatggcatgtgagatggctacgttcggtattccacttgtcacttctgatattccggtttgtatggaagtgtttaaagggtttgagaatgttggctttttcgacaatggcgcagagtatattgatattaaaaatatttataaaggtttggcagaaaatgtaccatataaacgtaatcataaatattttggggagaatacagttgggctggaaatcaggttattaaaagatttacagaagtaatagaaagagaagcgaggatttgatttttatcggtaaatatgttaatgagcgaaaaatattgtataatgcgtcggaatttgatattataaaagaagtgtgcgtaataaaatgtaataattttgaaataaagaggtcatatttatgaaaagagttattaactttagaaattcaagaaccagaatgctcttgttaggaatagtagatgtattaacaattatacttaattcatatctgtcattgatcataaggtatgaagggcattatacgtgggtgccatttgagtatttagatagtatgaaggcttatatgattataaatatagtaactactatctttatttttataatattaaatctctacagaagcgtctggacttatgcaagtattcacgaagttgtactcgttgtttcagccagtatgctgtctacggcatttcaggcttttggcatgctgatactcacattgaatgttccgagaagttattatgcattgtattttttccttatgactatgacaactttagcaacgagattttcctacagaggtctgagggcgcttcagagggggatgaaaaggccgagagaacatgctgtcagaactatggtaataggtgctggagaagctggaagtctgataattcatgagcttaagacaagcaggcatcttaatagaaatgttatatgtattatagatgataatccttccaaaaaaggaaagtatcttcatggagtccgaattattgggggctgtgatgatattattacagttgttaataaatatgaaatagaagaaatcattcttgcgataccatcggcagaaccaaatagaactaaaaagattctccgcatatgcagtcagacaaattgtaagttaaaagttttgccggggatgtaccagttgatcacagatgaggtaagtgtatcaaaattaagagatgtatctatcgatgatctacttggcagagaaagtattaatatagatttggacagtgtggctggttatgtcaccggtaagactgttttggttactggaggaggaggttccatcggcagtgagttatgccggcagattgtaaactataatcccaattgtttgattatatttgatatttatgagaacaatgcatatgaaatacaacaagaactgaggaagaaatatcctcatctgcacctggaagtgttgatcggatctgtgcgtaatactgccaggattgaatgggttatggaacattatcgtccagatgtagtataccatgcggcggctcataaacatgtgccgttaatggaagacagtcctaatgaagctattaaaaataatgtatttggaacgtacaaaacagcaagagccgcagacaagtacggtgtgaagaagtttgtattaatatcaacagacaaggccgttaatcctactaacattatgggggcgtctaagagattatgtgagatggtcatacagacttataataaatattcaaagacagaatatgtagcagttcgttttggaaatgtacttggcagcaacggaagtgtaatccctctgtttaaaaagcagatggatgcgggtggcccggttacggtaacgcatcctgatattatccggtattttatgacgattccagaggcggtgacgctggtgcttcaggctggggcttacgcaaaaggcggggaaatctttgtactggatatgggagaaccagtaaaaattgcagatcttgccaagaacttgatacgactgtcgggctatacgcttggagtggatatggaaattgagtatactggactgcgtccaggggaaaaactatatgaagaattgttgattgcagaagagggactgcagaaaaccgaaaatgatctgatatatgtagaagaacccatagattttgatgaggtgcattttttgagcgaattaaagaaactggaagaggcagctattggagaaagtgaggatgtcaaaacaatcgtctccgggatagttcctacttatcatataagaccagaagatatggaacgtgatatggaaatatataaagcattaaatggtcttggacgagctagtcatgaggggcctattgtggagggaaaataatgaagaacaatatgcatatagcattctcacctccggatataacggaggaggaaatagaagaagtaattgatacactgaaaagcggatggatcactaccggaccaaagacgaaaaagtttgaaaaggagatagctgcattttgtaacacaagcaaagcggtgtgtctcaattctgcaactgcctgttcggaaatgacacttagacttttgggtgtcggacccggggatgaagtaataacatcggcctatacgtatacagcgtcggccagtgtaatagcacatattggcgcgaaaattgtgctggttgacacggcaaaagactcttatgagatggactacgcacagctggaaaatgcaattacggaaaaaacaaaagtgattattccggttgatttgggcggagtcatgtgtgattatgacaatattttcgagatcgtggaaagaaaaagaaggctgtttcgtccttgcggcaatatacaggagaagataggaagaattgcgatagtagcagatgcggcacacgcagttggtgcaacaagaaaaggtaaatgttgtggagaggttgcggattttacttgcttttcatttcatgctgtaaaaaatttaactacggctgaaggaggagcagttgtgtggcgggatatcccagggattgacaatgaggatatctataaaaaatatatgttgttatcgctccacgggcagtcaaaggatgctttggctaaaacgcaattgggagcctgggaatatgatattgtctcaccttattttaaatgcaatatgacagatataatggcttccctggggctggtacaattaaaaagatatgcgtctattgaagagcgcagaaaagaaattatcctgaaatacgacgaaggatttaaggatctgcccgtttcaacattaaagcattttggaacggattttacctccagcggccatctttatctcgttcgtgtagatggcaggagcagagaagaatgcaataacataataaacaaattggcggaagagggtattgccgcgaatgtgcattacaagccgctgccaatgctcagtgcatacaagaatatgggatttgagatgagagattttcctaatgcatatgaaatgtttgaaaatgagatcactttaccgctccatactaagctgacggatgaagaggtggattatataattgccacatttagaaaaattgtaggcgaatagggaaagattatgagaaaatgggaacagctgccatcgtttatgcagattgaagaggtgaaatattattatgatatcttaagtaagcgcaaagtcagtttgtttatgaaacggacttttgatatcattgctgcgggtgtgctgcttgtagttttatcaccggttcttttaattatcagtatcttgataaaattagattctaaggggccggtaatgttcaggcagacacgtgtaactgcgtacggcaaaaaatttaaaatatacaaattcagaacgatgattgaagatgctgataaaaagggaactcaggttaccacaagtggagatgtccgtgtcactagaatcggtcgtgtgcttagaaagtaccggttggacgagataccgcagttgttaaatgtgctgcagggggatatgtcttttgtcggtacgagaccagaagtggttaaatatgtggactgctatacaaatgatatgctgccgacattgcttttgccggcaggtattacatcgttgacgagtattgaatataaagacgaagagaaattgttagaatcagtggatgatgctgatgaaacttatgttaaaataatattacctgaaaaaatgaaatataatttaagggcattaaaagaatttagctttattcaggatattagaacaatgtttcggacagtgacagctgttattaaatagttgaaggagattaacagatggacatatggattgttaatcattatgccatcccgccaagtatgggaggattggtcagacattattatttttcaaagtatttacacaataaagggcacaaagtaaagatattcacgtccagcaagatccataatacgaatataaatataattactaataagtctttatataaagaaatagatgagaatggcgtattatatacttttgtcagaaatcgcgattataaagggaatggtatagacagaattattaatctgctggatttccccttcaagatttggaggaccttgaaggttttttcgaaaaaggaaaaacctgatataatatatgcctcttctcccgacttgtttaccgttctttttgctcttgtatttgggaaaatgcggaagattccagttgttgttgaagtgcgtgacttgtggccggaatcaattgtagcctataatagtatttcaagcagaaatatcattatcaagattctatatttattggagaaatggatatatataaaggcagacggaattatatttactatggcgggtggcaaggagtatatagaaaaaagaagatggtccggtaaagtagacttaaacaaagtatttcatgttaataatggtgtagatgttgcagagtttgattttcaagcaaaacaatactctgtcagagatgaggaattagatgatgacagttattttaaggttatctataccggttccataaggcatgcgaatggagtggataaaatcgtagatgtggctgaactgttacagaagcgaggagaagataagatacgttttctaatttatggagatggaaatgaaaagcaaaagttagagaatatatgtaaagaacatcggttaaataatattttttttaaaggtaaggttgaaaaaaaatatataccttatatattatcgcgcggcaatctgaattatatgcatggtatcaataccgggatcatgagatacggctgcagcccaaataagctgtttgattatatagccagtgagaaacctattttgtctgatttgtcacccaagtatgatttgataaaggaatatggattgggtaaaactctgaaaagtccggcggcggaacagatagcgaatgcaattattaaattttcacagatgaatgaggaagattataatagaataaaagataattgcagaagggtgaaatcgatctatgattataaaagtttatccggagaagtagaaaggattttgaagttaaatgttaagggagaataagatgaaatttacgttagatgcatacagtgaacttgttaagctgataaaagacaaagggtacagcatatgtacttatgatgaatgcagaaagtatgataaatttgtgattctcaggcatgatgttgattttgaacccgaaaaagctgtggagatggcagagattgaatctgatctggatgtaaaatcaatatatttttttcttatcagcagtgatttttacaatgttttgtcagtcagaaaccaacgttgtatagcgagaatactggaatgtggtcatgagatagggcttcactttgatgagacaaagtatataggatgtggacttgaaaagttaaagtctgcgatatttgaagaaatacgtatgctcgaagcaatgactggtgtgaaggtaagagcagtgtccatgcaccgtccgtcaaaattaattttagagtctgatttgaaattgggaactataactaatacatatgaaaaagaaatgttcaaggatataaaatatctttctgatgccaggatgaactggcgcgaggatgtgtttaaaatcataaaggatgaagaattcaacaaaattcagcttctaacgcacgctttttggtatgaaagaaaagaaacaacaattaatgaacgtttaaaacgttttgtcatgcaggcaaaagatgaaagatatgaggaattaaaagataatctgcgcaatcttgaaagtgttttaaaaaaggaggatatttgatgtcagtatgcattactaaaattattgcctttttgaaagaaagtggtaaagacttcagttttatcggctcaaaagaaatcgagataactggattttcttctttgagtaatataaaagagaaaagtataatctgggtgaaaaaggggacggaggaattagcggagcgaataaatgaaattccaggtcttcttgttgtgtgtacggatgatttttatcagaagacaaataaagagatcaatacaataatatgctcaacccctaaggcagtctatttttctattctggagcatttttttgcggttgaaacagaatataaaatagaaaagagtgcagtagttgagacttcggatatcggagaaaattgttctgtaggccactttgcgtttataggaccgaacgtagtgttgggaaacaatgtaaaggtaggtagtcacgtcagtatcagtaatgaggtaaggataggagacaattcgataatcggagcaggtactgtcattgggagcgaaggtttcggttattataaaaatgaagagggaatcagtgtaaaggttcctcactatggcggagtcgtgataggtcggaatgtagagataggtgcaaatgtatgtatcgatagaggaacgttggataatacggtgatagatgattttgtcaagatcgacaatctctgccatattgcccataatgttcatatcggggccaaaagtaaggtcatagctatgtccatgcttgcgggaagcagttctcttggggagtcggtatatgtagcacctggcacattggtcaataaccaagtgtcagttggggacagaagtgtggtgggccttggagcgatggtacttaaagacgtagaagaaggcaaagtggtagttggtgctccggcaaaggttttaagaaacgtgacagaggaggatatgaatttatgatgattaggacggtggcagtgctcggtgcaaacgggacaatgggaaaaaatatttcagcaatttttgcatcatttggcggagcacgtgtgtatatggtctgccgaacaaaggaaagcgcagaaaaggccaggcttgaggctcccggcacagtaagagcggatacgattgaagaaagactgatagcggcaacttatgatgaacttccggatattattccaaagtctgatttagtgtttgaaagtgccgcagaagatatggaagttaagaaaaagatcaaccagatgatagctccatatctttccgagtacgcagtgttgtgcagcggtacttcagggctgtctattaataagcttgcacaagctctgccggaaggagctgcgaaacgatattttggcatgcatttttataatccgccttatagtatgcctctttgtgaaatcataccgaatgaggatacagatatttcttgtcagagggcagttgaagaatacttgaagaataaattgtttcgtacggtggttgaagtcagagatcaggctgcatttctcggtaatagaatagggttcttttttataaatgaggcattcttatatgctgaacggtatatggagaaaggcggaattgattatatagatgaaattttaggaggttttacaggaagaaatatgcctccagtactgacctctgattttgtcggactggatgttcatcaggcgataatagagaatgtatatttaaatagtgttgactgctcaaaggagagtttccgaacacccgcatttttgaaggagctgctgtcagaaaaaagatatggacgtaaagctggtgaaggcgcatacaagacagtacggtaccctgatggtaaaaagcaggttcaggtatatgatattcagtcgaaagaatacagagataaaagatattatgatattaaattccgaaatgatgttatccggtatttgagagacgggaactattattctgcttggaatattatttcagaagatacaagtaaggaggcagtgattgcaagagacttccttataaggtatgttgtttattctctggctgtttcgagtgaaatagcgcctaatccgtttgcggccgatgatgttatggccatgggatttaactggattccacctcttgctgtaatagatgcgtttgggggaaaagaaaaagtattgcagatattacaagatgcagaccttaataatctgaatttgagttcggaaaaaatagaaaagctaatcctgggagctccaaaatcaaaatatgattacagaaaatttttaaaggctaaataagtgaggtgaattatgggagaaaaagtatttattcttggtggcgcacagacagacttcgagagaaactggactaaggagggaaaaactgaaattgcattgttgcgagaagctgtcgatgatgcacttcagaacgtaggacttgattatacggatatttccttgttgaataaggaaaataaaatagcgtgttttgtggggaattttatcggtgagctctatgtcgatcagggacatcttggggcattgcttacagaggtaaatgaagcgttttatggggttccgtcagcaagatatgaagctgcctgcgcatccggttcagttgcgttggacgcaggaataacaaaggttgcttctggggaatatgatttggttatggtaacaggctgggaactgatgaaaacggtagatgcaaagacatgcggcgattatctgggaagggcggcctattataaatatgaggcaaaaggagtagattatccatttcctaaattgttcggtaaattagcggaccagattttggataaatactcgttggatgaagagcgatttttggctgctctggccaaaatagccgataaaaactataagaatgccaaaaggaatccattagcgcagactaggaaatggtttatggatgaaaaacaggcgaatacaagagacagttcaacgaatcctgttgtaggaggcaggctggcatcatcggactgttcacaaattacagacggtgccgcggttgtatttttggccaatgaaaagtttcttaaaaagtatgggaagaagccaaatgaatatccgtatgtcaaaggttatggtcatagagtggcgccaatgatatttgaaaagaaaatgcaggagagtaccggcaatgattatattttgccgtggacaagacaagccgtacttgacgcatatggcagatctaatcttacagttgaagatatagatgtatttgagacccatgactgttttacttccagcgaatatgcagctgtatctgcttttgggattacccctccgggcagagaatacgaggcgatagagtctggcgctacagaattcgggggaaggtatcctatcaatccaagcggtggtctcattggatgtggtcatccggtaggcgccagcggcgtcaggatgttcctggatttatataaacaggtgaagggatgtgcaggggattaccaggtagaaggtgtgggaaatggcctgatgttgaacataggcggctctgcaaccacgaattacgtttatattgtaggcagatagagggaattttgccataaaaaaagaaatttgttataattgagaatgttatgacgagttaataattatcaaagagagtggaaggataaaaaaatgaaagatgaattgctggcaaaaattgggaacagggaaattatagtgggagttgtaggtctaggctatgtagggctgccgcttgcagtcgaaaaggcgaaagcaggatttagaactattggctttgatgtgcagaaagaaaaggtagagctggtgaattccggcagcaactatataggtgatgttgtcgataacgatttaaaaaaattagttgaagaaaagatgcttaccgccacaacagactttagctttgttaaagacgtggattttgtcgcgatttgtgttcctactcctctggatgcgcatcaacagcctgatatcagttatgtcaagtcttcgacggaagaaatcgcaaatcatttgacgaaaggtacgatggtagttttagaatctacaacgtatcccggtacgacggaagaactgatacgcccaattttggaggaaggttccggactaaaatgcggtgaggacttttatcttggcttttcgccggaacgtgtggatccgggtaacttaatatataaaacaaaaaatactcctaaagtagtcggagccatagggaaagatgccacagaagtaattgctgcgatgtataggacagtactggatggtgatgtgtgtgaagtatcgtctccggcgatcgctgaaatggagaaaattttagaaaatacttatcgaaatataaatatcgggcttgttaatgagcttactatgctctgccagaaaatggggataagtatgtgggaggtcattgatgcggcaaaaacaaagccttacggatttcaggcattttatcccggccctggtcttggtgggcactgtatcccgctagatccttattatctgacctggaaggcgagagaatacggatttcatacatcaatgattgaaagctcaatgatgatcaatgatcagatgccggagtattgtgttgagcgtgccagccgcatactgaaccggcaggggaaggcgatgaattctgctaagatattggttgttggagttgcttataagcaggatatcgatgattatcgggagagtccagctctgcgtgttattgaggtgttggaacgggaacaggctgatgtcagtttttatgatccatggatcacagaatacaaatataagggaaataaatatgccggcctgcagacgataactcctcagaccatcgcttcatatgatctgatagttataacggcggcacatacaaacgtagattataaaatgattcagcaaaacgccaaagctatatttgatacaaagaatgtaatgaagaatatcccagacagagaaaatattgaagttttgtaagccatagcccagagtatagcgcttggcagaatgtaatagaatcgaaagcaaacgaggagtaatatggaaagaaaaagatgcatttttcatatacctaaccacattgacatttctggaagttctggttctcaggtaagacctttaaaaatgcttcatgcatttgaaaatattggatatgatgtcgcggttgtgatggggtatggagaagaaagaaaaaaaagtataaaagagataaaaagaaacatcaatctcgggataaaatatgattttctttactctgaaagcagcactatgccgactttgcttacggaaaaaaatcatttgccagtatatccactcttagattttggctttatgaacttttgcaagaaaaaaggcataaaagttggattattttatcgggatatacattggaaatttgaacagtataaatcaggtgttcctaagcatcaaagaatgttaacgattccaatgtataaatatgatctgtatcagtataacagaattgttgatatactatatctgccaacgttatttatgagtaaatatgtacccaatatcaaagtcccgatcaaaacgctgccgccaggagctgtcagtgctgttgatatagcacaaaagaaaacagcattttatttaaaaaacagttcaagggaaattacaatattctatgtgggaggggtgcggggaatatatgatttgacaatattattgcgcgcaattaggaatatagaatatataaaaatgattatatgctgccgggaaaaagaatggaatgagtacaggcacaattatgaaccttatctgaccgaaagagtagagataatccacaagaccggtaaggatttggctccttactatttaaaatgtgatttatgctgctgttacttgcagccaggtgaatatgttaagatggggatgccgattaagctgctggaatatacaagttatttaactccggtgatagcaacaaaaggaacctctgcagggacatttgttgaaaaatatgattgtggtttttccataccatatggtgaggaatatattacagacttgttggagggactgtataaaaacaaaagtattattaaggataagcatgataatatgaagaaatgtcttgagaaaaacacttgggagcaacgggcggttcaggtggcgaatgatttgtccgaaataacataaaatcggtctgataaataagataaagaggaaacggagaggtaaaattatgaagtatgcacttattggatgtggcaggatttcaactaatcatgtcaaagctgcgatcaataatcaattggactttgtcgcggtgtgtgatgtagtagctgaacatatggaggctgtgctcagtcagcatagtttacaagattgtaatactataaaaagatatacagattataaaaagctcattgaggaaaatgacattgagcttgcagctatagcaacagaaagcggtaatcatgcggagatagcactctactgcatagaccatggaattaatgttatcattgaaaagccgatggccatgtgtatttcagatgcagacgagatcataagaagagcggaagagaaaggggtcaaagtatcggcatgccaccagaaccgatttaatgtagctgtacaggagatgcgcaaggctctggatgccggcaggttcggaaaactttcgcatggttctattcatgtccggtggaatagaaatgagaattattataatcaggcaccgtggagaggcacgtgggctcaggacgggggggctctgatgaatcagtgtattcatggtatagatctgctccgctggatgcttggagaagaaattgacgaggtttacggagcaacgagacaacagttccatgattatcttgaagcagaggacgtaggtgtagcagtagtaaagtttaaaaacggagccgtagctactatagaggggacaactaatgtatatccccagaatcttgaggagacattatatctgtttggggagaaaggaactgtaaaattaggaggcaaatctacaaataatatagatgtatggaatttttcggatgaaacagaagaagacagtacaaacaaagggttagaagaagagacgagcaatgtctatggtaatggacatacaagcctttacgccgacgttattgatgccataaataatgaccgtgaaccatatgtaaatgcaagagccggtaagaatgcactggaactggtcttggctatttataagagtcaaaaagaggggaaacctgtgaaattgccgttgagagattttgcaagtgttgatatggccggagagttttaatggacagagccagaactgaatgtgagcggtcagtattattgttgggccatatatggtatgttactttattctttcaattggtagaaagtgtggttccattaagggtaagcgtttttaaaatagcttttgtgatcatcagtgttcttttggttaaattgatcctgatagattacagagcttatctgccgcaaatagtaaaaaatataggtaatattgtcaaaaatattaaatttgtcattgtatttctgggactttatataatctttgacattgtcagttttttatatacagaggatatcaagtatgcttcggttaaatatattgtagtgattgaaatgctcatatttgcggggatatatctggtttatattgtgatttccggagaagcatattcgaaatgtaaagataaactgcttttaactattgcggcgtccggcgtagcagtttcttccatagctgtagtgaattattttatggaattttttccattgctatatataagaaggctgtctacgctggcagactataatcagtttgccactattattgtattggggtatcttgcaggattcctttatttgattgaaaaatcagaaagaaatgccagaaatatggctttgctgtctgcactttctgttttggaattatccactgtatatttatcaggttcaagacgtgcatttataatagaaatttttattgtaatatttttagttgtttttatatcaataaatatattgagactgaagacagaaagagggaaaagagccaagaatgtatgtaagttcatggttataactataattggatgtgtattattagttggtttaatgcagtatcagtttaatagaaattatgagaatggaaaacattccatgttggaaaataatgttgatgaaaatttttccaccatttttacgggtcaggctatgggaaagcgttccattatttggactattgcatttgatgagttgaaaacttataatgccaaagaactgcttttggggaaaggctcctcatactcttctgacttgtatgacagtgatgtaaaagaaaaacttatgaataaatattcacagcaagaaaaagattcggttgtaaggcattggatgtttgcgcataacttcttgttgtcagatatgctgactggtggaattattaaactgggatttagtttgggtttgctattttctataattatatatttatttaagcttaaagtggtggaatcaaaattctggtttttatcaatcatgattggcgtgacgtatatcaacgcgtttttatcattcaggtatggctttttgggggataagaattactggttttgtttgctgttgttactaatcagtctggaaaatgatattaaaagtaaagaaaggaacaaatatgcagtttagagatttaaaaacacagtatactgtactaaaacgggaaatagacagtggagttctcaatgtaatggaggactgtaattttataaacggtaaacaggtggaagaactcgaacaattacttgcggaatatgttggtgttaaacattgtatttcatgtggcaatgggacggatgcgttgacgatgatgctcatggcatgggggatacaaaaaggtgacgcagtttttgttcctgactttacattttttgcctctggggaagttgtttcatttgagggagcaacgccggtattttatgatgtggaccccagaacttttaatgcggatgaaaaatctttagaaatagccattaaagccgttatttcagaggggagattgcgtccaagggcgattatagccgtggatctatttgggctgccggcagattatatagcgttagaaaaagttgctgaaaagtatggactgcttttgctggaagatgccgcacaaggttttggaggaagaattggagatcaaaaagcctgtagtttcggaagtgcgtcgacaacttcattttttcctgccaaacctttaggctgttatggtgatggaggtgcggtctttactaacgacgataagattgccgaatatctcaaatctgtccgtgttcatggaaaaggaaaatataagtatgacaatgtgcgtattggttggaattcgagattagatacgatgcaggctgcaatcctcaaggtaaaattagatgcatttaaaaaatatgagttgccagatataaatgcggtggctgaaaagtatacttgtgcattaaaagacattgtaacaactccttttgtcccggaaggattttattccagttgggcgcagtatactattaaattgaaaaccagggatcaaagagatgggcttaaagaatatttgaatcgatttgacataccgagtatgatatactatccgaaagcaatgcatgcacagacagcttttgataaagagacacagtatgtggagtgcagtacgtcaaatctgctctgtgatacagtgttgtctttaccgatgcatccatatcttacagaggatgacattaatatagtagttgataaaattatagaatatatagatttaagaaatcaggtgcgttaaatgcaaaagaaagtagaaactgtagagcgggggcttagacaatacgaagaaaagcacccttttatgccaattataataactattttggttatgctgattttaataggttctgtatttggcgtatataattatcagaaatatgaaagatataaatctcaagcagtaattgattttacagatcctgtttttgagaaagaaatacagaaggttctggagaagaaaaaaatatatcaatcagatctggatatgctttcagttttgtatatagatggaaatgcgcagctgagcgatataagtgatattgaaaaatgcagaaatttaacaaaagtatcgataacaaactgcgatataaaagaagttggtattttaggtaaattaaacagcatacgatacgtggacctatccaataatagcatatctaatattgatgggctggaagaatctaattctattaaggaaatacaactgtccaggaacaaaatatctgacatgacaactttatgtgaaatggaatcattggagatgctgaatgtttccaataataatattagtatgattcctgataatataaaaaagttaaaaaaattaaagaacctggacatctctgggaatcggttaatcgatattaatggagtttcagtacttgaaaatcttacggaacttaacgcatcttccaataaacttaccgatgcccctgaattgagtgcgttaaaacaattgatcactttacaattagctgggaatgcattaaaggattataatccacaaagtgagatgaaaaggctccttcagttagatttaagctcaaattatttggacaatctcgattttttagttaagtatccatcattaatcaagttaacgatatcaaataatcaatatacgagcttagacggcatagaaacagcacgatcattacaagttttggatattagagggacaaagataaatgacgtctcaatgttagctgagtttccggattttaatgcgatttatgttgatgattcatttgacaggactcaattagacttcatgataggcaaatttaaaaacgccgataagctgacaaaagagtatttgatagcacaacaatacaaattaaaataaataattgaggaatttatatgagcagtgtaataattataataaccatctgttttctgtgttcgacttttttgttttggaaagcagctggaactttaaatcctggaaaactaaatacgatatcgtatatttactatatttatatgatacaatcgtttatcggaactgcgttgatcatgatgggatttgataaacattatactttgagctacttagttgatagggaaaaaagtattcgcaccgtgtctgttattgtgcttggaatatctgttgcgctgcctttattaataatattatttcagaaatatactagaattaatatgagaagagattatgagaggtttctgaaaaagaagatagagtataaccatgatctatcagcttttatcgttgtgttggcggctgttttgatatgttctgttatattgatcggttttatatgtaagattggttatgttcccttcttcaagtttttttttgcttctgataattttgagttttcggttgaacgtgcaaggatagggaagctttggtttataaacccatattttacaaatatttttgttttaagtcttataccactgttttcttacatatccttttcttatatgcttgctgttaaggataaaaaatggttttttataagcctggttttgtttataatgtctgtgatagttaaaacaattaagtttgaaaaatcacctttaatctttcatatacttgtctatattttgatatatacgtattataaaggtaagattaaaaagagttatataatggcgttaggatttgggctggcaggattgcttgtatttttttatgccgcgacaggctttagtggaagcatactcgatatctataatggaccattgggcaggaccctttttacagaggtgggaacattagcgtattcgtttgacatgtttccggcaatattcccatttttgggaggaagaagtttttcgccgactatactacgactgttgggcgtgagtggagaattacatttgagaagtgcaaagttgacaatggcgtattatggttccgaaagagtatatgaggggtcggcaggggttatgaacacactgtttgcgggagaagcgtatgctaattttggttataaaggagttgttttttctgtaatatgggttgctgtatttatcggagttactgtatggataatcttaagattaaaaaaaaccccagtggttacaacatttgctgctttaatgacaatgaaattaggagcaatgctcgaaggtggattttttgattttatgtataatttcgatttaatattaatagcgattgtgatatttggttcatatttattatttgatacagatgggaagatacagcggttaattcataaaaatgttgaaaaaatgagtggtatgatatgcttaaaattcaaaatgttaaaaaaaagctgattgatttatttcacggtggcttttttcatatatttacgggaaatatacttgttaaattaattgcttttatttcaagtatagttatcgtaagattagtagataaggcggattatgcgtatttagcatatgctgacaatctatataattatgtaatatcttttgccggcatgggtatgactgccgctgttttaaagtattgtgctacagccaaaactgccgaggaggataaggcgtactttgcttttgccttgaaatatggaactttatttcagtttgtgttatcattaatcgtagtatgttatgttacttttggtaatattgcttttcccgctgccaggccgatggtctatgtacttgtattgtatcctgttcttaataatgtactgaatgcgatcatgaattatctgagagcacatgggtgcaatcaattatatgccagagcagctgtcgtccagacactcgtcgtttttataggcagcgttttatttgttaaactttttggtgttttgggcattgcaggtgccaggtatatagccattattatagcggcagtatgctgtggcgcattgttgaaatcccggttggcaaatgttaaaaaagtaaacttatccaagactgcactgcgtgcattttgggttatgtcattgtcattgatgatatcaaatttattttcgctgattatgccaattaatgagatgacacttgtcaatgaactgttaagagatgaagttgtaactgcaaattataaaattgcaattatgataccgggacaattgtcttttgtaactcaatctattattgtctattattttacgattgttgcaaaaatggagaaaggcggggatatttggaaattatctaaaaaggtaggaatggttactggaatggtgattttcgggatttctgccgttggcgccatgctgactcctgttattattcggcttgtttatgggagcagatatgaagacgctactacattgtcactggtattttggattgtaaatgcgttaaatgccgctatacgtatggtacctatgaatttcctgcctgcaataggaattgcaaaatttaatgcggtaatggcggctgtttcctgtgctgtacatctggcacttacgtttgtggcaatacagttatggggaatatggggagcaggaatagctacaggtatcgtatatctcatttcagggacagcctattggttatactatagaaaaaaatgcttggagatatagatattgtataaggaggataagatgaagaggacatataaggcaagaattgtaagcattttattaataattacgattcttatggcagagaataatctggctttggccgcagaaaatacagacggtgataaagaggcggattttcaagttgaactgtcaaaagaagacacggcaggcaatacagtacagatgcctttggaagaaacagataagttagacaacaatggcaataaaatatatagtgcagtgttagagctgggtgaatctgcaaagattaagctgctgccatctgttgatggagaggagtatttataccagttttctaaaagtaatggaagcggtatgccggaaatcatgcaggcgtatgattctaaggatgaatatacgtttacgccggagatagcaggcgaatatatgtatattattgaagcagaatcaactagcgggatatattactcaaggtcaataaactttacggtcaaggatcaggaaaaaccggaaaaaggagaggggacaaatgaaccggcaaaagaggaagccgggaaccagaaagcgcccggggacacaaatttaggtgcagcaacaggagaatatgggatctctggttacagttcttcagtagttccgctaaagggagaaataaaaagcaataagacgcaatatgaatatgcagatcgtggaatcgttttgaccgccaacgtactgcagggaaatggaagctatacttataagttttcagaagaatatggaggtacaacaaaggttgtacaggatacaagcacaacagacacctatcgtttttctacgtcagaaattggagaacatatctattatgcagacataactgatggtgcaggggaacagatacgtctttcttataagcagacggtagttgcacatccggacaatattttaaaggggatagtgtcaagtaacaaaacaacagtagagtatgagaaccgaagcgtgacactgacggcgaatgtaggacagggatatggaggctatcagtaccagtttacggaagtgtacggagcgcagacaaaggtagttcaggcatacagcagtgcggccgcgtaccgcttcacgacgaaaggggaaggaaagcatacctattacgtggatatcaaggacagcaagaatcagacgctgcgcctgagttatacaatgacggtagtgaaggaaccggtaacggcgatcaaaggcacactaacgagcaacaagtcgacagcagagtatgagaaccgaagtgtgacgctgacggcgggggtaagccaggggaatggaggctaccagtaccagtttacggaagtgtacggagcgcagacaaaggtagttcaggcatatagcagtgcggccgcgtaccgcttcacgacgaaaggggaaggaaagcatacctattacgtggatatcaaggacagcaagaatcagacgctgcgcctgagttatacaatgacggtagtgaaggaaccggtaacggcgatcaaaggcacactaacgagcaacaagtcgacagcagagtatgagaaccgaagtgtgacgctgacggcgggggtaagccaggggaatggaggctaccagtaccagtttacggaagtgtacggagcgcagacgaaggtagttcaggcatatagcagtgcggccgcgtaccgcttcacgacgaaaggggaaggaaagcatacctattacgtggatatcaaggacagcaagaatcagacgctgcgcctgagttatacaatgacggtagtgaaggaaccggtaacggcgatcaaaggcacactaacgagcaacaagtcgacagcagagtatgagaaccgaagtgtgacgctgacggcgggggtaagccaggggaatggaggctaccagtaccagtttacggaagtgtacggagcgcagacaaaggtagttcaggcatacagcagtgcggccgcgtaccgcttcacgacgaaaggggaaggaaagcatacctattacgtggatatcaaggacagcaagaatcagacgctgcgcctgagctatacaatgacggtagtgaaggaaccggtaacggcgatcaaaggcacactaacgagcaacaagtcgacagcagagtatgagaaccgaagtgtgacgctgacggcgggggtaagccaggggaatggaggctaccagtaccagtttacggaagtgtacggagcgcagacaaaggtagttcaggcatacagcagtgcggccgcgtaccgcttcacgacgaaaggggaaggaaagcatacctattacgtggatatcaaggacagcaagaatcagacgctgcgcctgagctatacaatgacggtagtgaaggaaccggcaaaagctgttaaggggactttgaccagcagtaaaactacttcagaatatgtgaaccgcagcgttgtgttgacggcaaatgttacccagggaaacgggaattaccagtatcagtatactgaagtgtacaatggtgtgaccaaaatagttcagtcatattctgataatgctatctatcgtttttctacgtcaggagtaggaaagcatatttactatgtcgatatcatagatgcaaaaaatcagactttacgcctttcatacacaatgacagtggcggcacatcctgactacgaactgacgggaaagctgtcaagcaataagacatcacaggagtatgttgaccgtgggattacattaactgctgaagttttaaaagacggttatggtgagtgtacttatcagttttcagagacatttgatggtaatactactgttttgcaggattttagtacaaagaagactttctcatttacgactgctaaagtaggtacgcacgtttactatgtgacaataaaagataaacaaggacagacatttaaagcttcttttacgatgaaagtatctgtgcacccggattatgtaattactggaacgcttacaagcaataaaactacggcagaatattctaatcgttctgttacgctgacggcggcagcgaagagcggatatggagactatacatatcggtttgtgagatattacaatggcgcaacaaaagttatgcaaaactacagcagcaataatagatatacttttacaacagggctggcggggaaatatacatattatgttgatataaaggaccgctctggagccgtagcacgagtaagctactctatgactgtcgtttctgatggttcaacatatagtggaatagatgtttcatcatatcaaggtagtattgattggaaacaggtgaaaaattcagggatttcctttgctatgttacgaattttatctggaacaatgacctctctttcggttgacagtaaatttaatgataatataaagggggccaccgacaatggaatttcggtaggagtatatcgatatggatatgcaatgaatgtaaaagaggcacagcaggaagcgaaaatggtggtcgatacattgaaaaaaagtggatatagaatctcatttcctgtagcatacgatgtagaggatgccaacacacagggaacattggcgccttctaaacttgcagatattatcaatgcgtttaaagtagttattgagaataatggttataaatttatgatctacagtggtcaatactggctcgagagcaagctcgatatgacaagatttgccggagacgatatctgggttgcgcggtggagggataatactcctgatttggggcatggatataaaggacttggaaatgtaactatatggcaatattcttcagaagggaaggtgccgggaatatcagggaatgtagatatggatatcggttatgtcagatattagcatttcattaaaaagaaagggaagatatgaaaaagtataaaactgaacgcttaaataggatgtttataggcatagaagttttgttatttattaccggatttggtttgggagtggctgcattgattcaacaatcctcaaatttattcctgtccagtatctgccttttatttgtcatcaatatatttgtagccttaaataatttgcgcagtcgttttttgtttattgtctttctgatatctttatttacttttttaatcggacgtccgctgtttggtattgtgaatggtattgaaggatggatgggttcgggacagcagcaagaaaatataatattttcattttttcttgtatttttaacgctgttgttcctgcccattggcgctgttggcatggattactttattactaaaaaacgttggaatctgggggagaatgcagatagaagagctaactctataatgctggataatctgcaggctgtggcactaatcgcattttatattacttatgttttttatttcattgtacagattgaaccccttgcttttatgcaaggtaaaaactatattcagtattatagggattttcaaagccagttacctggtattatccatacggtagcatcttttatgaaatatacgttatgtctgtttttagcgactatgccaagtaaaaaaagagctttttttccattagtactttttgctgtatctgctattcctatgctgatcataggagcccgtaatcctattatgctaaattgcttatttattgtcgtatattatggtttgcgcgatattaaaggatgtgctaaaaaatggattgggcgttttgagaagatatgtcttgctattacaataccggcgtccttgatatttatgtcggtatatgcgtttatacgaagtagtgcatcactcgtttcatttaatccttttgtatatcttcagcagttcttttatggacagggagttacatttaacgttttgcagattggttatggttataggaaaggaattgaactgcttggtaatcactatacctttggagggatgatagattatattaagcatggaacattggggcggttgattctcagcacggatccattgccggcgggaaactgcgatattaatggtatctatagtaataatctatctcataatctatcttatataactatgaggaaagattatttatccggacgtggcagaggatcttcatatctgctggaaacttattttgactttggttatattggcgtgattttgttcagtttattactggggggtcttttgatttttatggttcataagtttggaaataatgtacttgtgacaacaatcatacttgtttctttgacaactatatattttataccgagagcagaagcaacaggttggctcacttttattatcacaatacaattctgggcatgttgtttggcgtgttatattggcgcttatatttgtacgaaggtggtctggctgcaaaatttacttaaaagattgagactgagcccctcacataaagaatgattgaacaatttgttttagatatattagtaaagaatacggagaatatatgaaaagaatagctgttataacaatgggcgtaaaattggataatgaaaagggatacactcgatttcgttttttagctgaatttttgacatcaaatggatacattgttgatttgattaccaccagttttcagcattgggaaaagcaacagagagatatgaaaacaatcaattttaatgattatccttttggcatccgttttattgaagaacctggatataaaaaaaatattgattttcgtagaatatacagtcatggagtggcagcccgcaatttgaagaaaatgttggaacaagatgggcaatacgatttaatatattgtgagatcccaccgaatgatgttgctctttcagcagcgaggtttgcgcaagatcatagcattccgtttgtggttgatgttaatgatctttggccggaggcaatgaaaatggtcatagatattccggttctcagtaatttactcttttctaaatttcgcagagacgctgaagaagtgtacagattatgttccggtgtgataggaacgtccgatgagtatcgtgacagaccatttaaaaaacaaagtaggaatattctaaaagaaacagtgtatgtaggtaatgaactaaagatatttgatcagggaattcaggattatgagaaaagtatcaagaaagatgagggggaatactgggtaacgtatgcagggacaataggaaccagctatgatataaaaacgatgattattgcggctgatattttaaagcgcaaaggctttaatgatattcattttaaaatcctgggagggggtcccttgaaggatgatatggaaaagctggcaggtaccctgagtgggaacacggagtttgtcggttatgttgcatacgagaagatggcagcatatttgtcaaaatcagatattcttatcaattcttttgttaagaaagcgccgcaaagcatagttactaaaattggcgattatcttgcagccggtaagcctatgattaatacttgcagcagtgaggaatttagagaaaaggtaagaaaggatggctttggaataaatgtcgaagcggaaaatgcaccgatattggcggaagcaatattagctatctttacagataaagaacgggcaatgcaaatggggttaaaagcccgtcaaattgcagaggagcaatttgacagacctaattcttatataaaaatattgaaaatgattaataaacttacgggtcaataaactaaaagtggatattaaaatcgagtggttgaaaaagtctcaagaatcttgtgttttaaagttcttgagatttttacagtatcttttcgcgagtgtatggtaagatatcaccaaaatgaaaaacggagaataaagaattatgaagacgactaattataaagttataaagcaggctgtattttttttattgctgtttattacagtggtgtggttttttccatttatggtcaaaggaatagatacgactgacatggcttattacttaataaactataaatattttttttcatcggatgtggatttaagaagtgtcggtaccatattcactgacttactgggagcaggaatctatcatttgagaaattcgggacaggctatgctcctagctgtatgtcattgggctctgtatatggggagtggattgatagtatacagatgcttaaagaattatgttcaaaagcatcttttattattagggattctggggggaagtttgttttccctgaccgggatacatattatgaattataatgctacgtctatgtttattcagacgatggcaatttgtgtgcttataagaggtatagaaaaagagcggagcagatttatcgtgactgccggaataatatttggagtgaatacttttttccgccttccaaatatactccaaatatgtgttggaatcagcatactgtggtattatgcacttggtaaaggagaagtaaaaaccggaattattaaatgcgcgcaatttgctggaggtgtgtttggtggttggacagccggtggtacggcagttcttcttatcgcggggaaggaaaaagtgctggcgtatttttttaggacaagtaatatgcttggaagttcagaaaacagccatggcatagtaaacattttgacaaagctttatgtaggggcgaaagaaggtattaaaaactgggttatcttcggaagtgtattgcttataattcttattatctggaatttacttgtgaaaaaagcaaaattccatgcggtaatagaaaagaaagtttttatatgttttggaatactaacagttctttatggaatctatgctgggtggaagttggaatatctacagttttatcaaatgattggaatgtgcatacttgtagttatggctgcaggcgctgtttattacaggaaaagaaatttgttggtaagttctgtctgcgtaataacattttgtgcggaagcagtgttaagtataggaacagataatgggtggaattatcaggtggtatttcttatatttccattgtgtgcctgcctgcttgctgtttccagttgtacgcaggaaagcctaaggaaaaatttcatgctgtgtatgttgtttactgcagcaatgctttttgttgttggagttcgttatgcaacacagtatgtttatagagatgcacctaataatcaattgaagtacacagtgaatgctgaggagtatagcggtttcctgacttctaaagagagggcagaatatattgacgatctggaagtcgcactggagccgttaaaaaatgaatatttgttatcatatggtgattttaatactggatatgtaataactgatatgaaaccgcttccaaaccgcgtatggatcgatctgcaaagctatccgtcagagcagtttaaaaaggatatttatgatgggataaaagaaaagaactatcctgtgatcattctggcagatcttgatcaagatggagtgtatcgcagtgaagaaaaattagaaataattgaggcagttatgaaagagggacactatcaggaatattatgtaaatgattattataagatatttacgccggaagggatgaagttttaaagtgttaaagctatatgtttcggctgtatcttttatttagaatgaacaaaatatgtaatagcacttgctgaaccaaatgatttagtgtacgatattttaagtgtattataaagatatgccacaggtttgacaagaactataagttatataaaggtgagttattatgaatacagacacacattataattttcaaaaagtagatgcagatgttgcaaaaggcgtgggaatttgtatgctgcttatgtaccatttgttttataaagaagaggtggtttatgagtattccccctccttttttccgcttggatatgaaaatatttatctcttaattagcggaatgaaaatgtgtgtttgtatttttgtatttttgacgtcatatggtatatcggctcaaattggagatctggagtcgcgcgatattgtttcaaaacaaagcgcagggcgctttgtcaggttaatggaaaaatttatagtggcatcaatttttgcgatgttattatgtttcctgttcgacaaagaaaaatttagcgtatatgggacgggcgttgaaggcgcgtttaatatggctgttgatggattaggcttggaagcttattttcacacccctactatttgtaatacatggtggtatatatcatttgcttatatgctcgtttttcttgtacctttttgctgctacttatataataaacttggaaacgttatactggcagttgtgtttttcttaccagtctatctgaatttggaggaatcttcaataggtttatatctgctttcagttttttttggtattttttttcataaaaatgattgtattattaaatttagaaagtggacagaaaaggaagatggctttttaagagttaagattgtacaaaatggaataaaatttttaatatgcatattaatgctaggagcttttttctggataagacaatatgaaaaggctatttttttaatagatacgtttggagcaattataattgtactcttctcatattcctatttaagtaaaataccgataataaactatgtgcttcaaaaattaggaaaatactctttgtatatatttgtactgcatacagtgataaaagatatatggataaatcaaattttcagtctgaattccgcctgggttatgtggggaatacttttggctgtatcctacatatgcgcgtggtgtttggatatcttggagaaaaagttatttagaaaaatgtatagattatgaggtggaaaatgataagtagattaagagatagaaataaagaaatgttagaggctgtcgtcttaaacttaatattgctattccttttttttgtcttatttaatccacagtttgaggcaaatgatgatattagtatgtcatggatcgttgagggggcatatggcgcaaggtatgataaactggtttttagtaattttatgtatggctggatattaaagggattatatacaatatgtccggtgataaagtggtattcggtaatgctgtgtctggcaattttcacttcgttttgtgtcttgacatatatttgcttaaaaaagattccaaagcctatgttttattttgtttttattatagctggtatatacttcggatatgaaggctatactttgctgggatttacaaaaacagcaggaattgtatcaatagcaggatacactttgttattttgggggcaagaaaagaggtttgaaaacaggaaagctttattatttgggggtattctgcttatatggggaagctggattcgcttttttgcatttcttatggttacagcaatatttggaatgtatggattggccttaacaataaaaaagataaagacggagagaacaataaaagcagtattgaaagtattgcaaccatatgtcttgtgttttggagtttgttttgtattgattttttcttgtgagatatttgataacttttcatatcagtcggatgcagagtggaaaaaatatgaagaatataatagtttgagagcccaagttattgatcatggttatttatcctgggacaaatacggtgataagtacgaagccatgggtatttcagagactgatgttaagatgtgggcgagttggaactttgcggattttgataattttaatattgatgttatgaagcagatattgaaatttgatgagggagaaaaaaattttataagctatataaaaccctttattctgacatgtatgcagttgttttcagtcaaagtatttatctgttttttatgttttctgcttctttatattattgcagaaaagaaaaaagagtgggttgcgcttgtgtttttggctcttgcagtaggggggatcatattttatttagtgtataatgagagatacggtctaccaagaatcaatttaactttatggatggcaccaagtgcggttctgctgctgttggtaaatagaaaagaagagagcataatctggaatacacggactggtattattattcctttattagttattagttttatgggacaggatctttactcggctgcatttgaacgaaacaacgggaatttctctgtcgagatgaaagagttattcgaacaaataggtgaaaaccaaaatgatctataccttatgatgactaattcagaaaaggttacatcacagtttggaatgtgggacgtggctccatacggatatagaaaaaatgtttacgccttggggggatggtcgacgaaagcaccttatacaaatataatactagaaaattacaacgtacgaaacccctttaaagatataaaaaaatcaaatattcatgtggtatcgcgaggtgatattgatatactagtagaatatttgagagaaaattatgatactaatacatatgctgttttggaaaaagaaataggagaactgggaatttatagaatacactaaaggagataaaaaatggtaaaaatatcatttgtgattccgtgttacggatcagagaattcaattgaatcagttgtgaatgaaatcacagaaactgtaaatacaaggaaggatgaatatgattatgaaattattttagtaaatgattgttcgcctgacggagtatggaaaaaaattaaaaaaatatgtgcagataataagaagatcagaggcattcatttatcaaagaattttggtcaacaatcagcgttgatggcaggatatagaaacatagagggtgatctgcttgtgtcactggacgatgatggacagactcctgtcaatgagattttcaaactggtagaccggttaaatgaaggatatgatgtagtttatggatattatgaacatagaaaacacagtccattcagaaattttggaagtaaagtagataaggttatggagagaattttggttaacagaccgaaagatttacgaagcagcagtttttatgtagcgagaaggtttgtggtagatgagctcgtaaattatagaaatccatatgcatatataggcggacttgtgtttcggacaactcaaaatatttcttgcgttccggttacacaaagagagagatattatggtgaatcaggatatacttttaagaaattgttgaaaatgtggttaaacggatttacaggtttttcggtaaaaccactaagatttgcctcatatttgggaatattaagttcactccttggttttctgtttctcgtatatcttataattaaaaagatatttggggcgcatgttctcgcgggttggacatctacaatagcagtaatgcttataattggcggtcttattttatttgtacttggtatgctcggtgaatatgtcggccggatatatatatgtttaaataatgcgcctcagtatgtaattaaggattcaataaattgcgggaaagatagggagaattaaatggcagaaaaggtaaaatcaagatggtcaatatatgttttaatacaattactggttatgctgtattcaattgtaggagtattatcaaaaacagcatcgagctttttggtcaaggaaggttttttctctttgcgttttgtcggaactgttggactgatggtctttgttttgggagtgtacgcgatattctggcaaaaggttttaaagaaaactgaacttgcagttgcgtacttaaataaatcgttttgtttgttttggtcgttgctctggtcagtattgttttttggggatagtataaagagtaatcagatagtgggtataatagtgattgtttgtggaataattgtggtgacaaattatgataaataaatggattttgttaatgggtttttcaggttttgtagcttcgatgtctcaaattatgttaaaaaaaagtgctttaaagcactattccaactggattagagaatacttaaacttctgggttataggtgcgtactttttactggctgcgtcaatgtttttgaacataatcgcttatagaggaataagctatcaaaccggaattgtaatgggggcgttaccatatatttttattattatattggaaaaaatatttttccataagaaaataaattgtaaaaaagttgtcggtacatgtctgatcatattaggaatttttatatatgcattataaaatcattttttaaagagaggaaaataataaaaaaatgtataagataccagtagttgttattcgttctaacgatcattgctttttagacattcttcgttcatgcggaagcgagggaataccggtaattcctgtggtcttcacttgggagggagccggagcgtggctttctgaaaaatctaaatattataatgctcctgtaaaaatatctaatccggctgaaaatgaaaatcttgctaaagaacaattattagaattgggaaagatactgagcctgaaatttggtgcaaaaatcttgataattccttcgagtgacacttcattgatctttctgcaaaaatattttaaagagttttcagcttatttttatcagatgggacatggtgactttacgcatgactgtctaagggagttgtcaaaagcgggctttgcacatgttatggaagagagcggtgtaaacattcctgaaacgcttgatgtagtacatgaaggagatgttgccggtgtagttaagaaaacgaaatatccatgtgtgtataagcctgttgttaagaatataggaaattcgttccagagagaacatgatcaaaagaaagcggtagaatgcaaaaatgcagaagaactggaaaaaagattgtactatgaggttaataagggatataaattagttgttcaggaaaagattacttttgaaaggatagaggatgaaatatctatttatgcgtattcggatgctgaaggtagaattacgatgttaagtggcttgcataaagtagtagaatacccacagccttatgggacaggaatagtatgtaagcaatacatcaagggggaactcgtatcggcggcagccaatgtgatgaaggctctggaatggcatggatttgcctgtatcgaatttatgaagaatgccagaactggagaatgggttgtaattgaagtgaatctaaggccctggttgtccatttactttcagggatttcttcaattcaattatattgcacagttatactttgagatatatgaaaaaacaaaagcagttacgaaaccagttgtctctgtaaataatgattttttgatgctggatattgtaaattttctggtaaaagaaatagaggaacaaggagatgttaaaagtgcgttggaaagaattgagggttttattttatcaaatatgggaaaatgtgtattttcttattatcttcccggtgatgaagcaccggggattgaagaaaaagagctgttaattaaaaaatatggagaaagacagcaatttgaccaattgtatgagctaatggaattaaataaccaagggttgacaaattttcagaagaagttaaacttaaaaaaggaacttaaataatatacatatagagaaggagaagaagaagtggaacaacgaaaactttctgttcttgtgtcaacaggaaatctaggagataatattatagaagaaggttctttttacgaagggactaagagacagattgacttttttgcggcggatgcaggtccgacatttttagggtccgacatgcctcacaatccggttgaatgggaaactcatgatttagaattgctcttagtcgagtcaagaaaaagaaatgtaccgatgatcgtaggttcatgtagtacgacgggtacaaacaaaggggtagatctgtatgctgatatcatccgatcattggctaagaagcataaattggcaccttttaaaatggcattgatctattcacaggtatcaaaagatgaattgttagaaaggattaaacataaaaatgtagaacctcttggtgcttcaaagaatctggatgaggaaacgataaacaagactgaccatgtaacggcttcgatgggagttgagcaggttatttacgcccttgaaaatggggcggatgtgatcttggcgggcaggtgttgtgatgacgcggtactggcagcctatccgatatataaaggttttccgaaaggaatcagtctgcatatgggaaaagcttccgagtgtgcatctttagtatgctggccgcagatgatcaaagaatcaattgtttctacagttacagatgaatattttgatattgagcctatgcaccctaaacaaagtgcaacgcctcacagtgtggcagctcattcaatgtatgaaaggacaagtccatttaaacaaggcgttccaggtggtattttggatatgcgggaatcaaaatttgaagcaataacggataaggttacccgcgtatcgaacagtacatttataccgtcggaggatggaagctataaagtaaagttagaaggcgccggatgtgtaggggcaagagcatatcatatcgtaggaataagagatactaacgcaatagcaaatattgatcagattttagaggatacttacaagaaagtagatgagatccttgcgccgcataaacgtggtgaagattatcaattgtatttccatgtttatgggaaagatgcgatcatggggcaattagaacctgaaaaggaaattaactctcatgaactgtgcattgtaattgaagcagtgtcggatagcgaagagttgtgtacaacggttgtaaaatgtgcaaagttccgcttcttctatatgagttatccaggacagaaaaattcatcaggaggcgcagtggcgctgctgacagatgaaccattgtatccaaaaaacaaatgttatcagtggacgattgaccatttgctgccattagatgatccacttgatgagaaaatttttaaatttcattttgagacagtaagtggggaaaaataaaatgtatgttgaaacacttgcagatttttatgcaaatattaatataaaagatatacctgagacagtagtgcgtaaggctcgggttacattgtttgattttctgacagttctgtcagcgggaaaatatgatagtgattttatagaaataataagacgttacctagatagcagaaccgaggcagaagaatctacaattttaggaatgaatgttaaaaaaagcgcacaaacagctgcattggttatgggaatgatttctcatggagtagagttggatgacgggcacaggcatggtacttgtcatcctgcagtggcgattataccggcagttttagcagaaggagaaagagcagagagttcttttgaagaaatgttaaaggcaattatcatcggctatgattgtatgcttcgtgctgccagagcgataaacccatcacatctgaggcgcggctttcacactacaggtacttgcggagcgctgggagctggtgccgcggcagcgtctttaagaaaatatgatcgcgaaaaaatggcttattcgataagtatatctggacttcaaagtgctggttttcaagaaatgcttcatgggaatccgtcaattaaagcgctgcagccggggaaggcagcacaggcaggcatactttcagcagagttagttggatttggggccaaagggcctttatctatatttgaaggtcaacatggctggctgaaagggatgacagacgaatatagagaagaggatttgctgggggaacttggagagcgatgggagatcacaaatacctatacgaagctttatcctacgtgcagacattgtcatgcaccaatcgatatgatgatagaaattcataaaaagggagtttctattagtagtattaagaagattatacttgaaacatacaatattggaattgtagaagtgggacttattaaacagccaaagaattttgaagaggctatgttttcagtttcatatagcatggcagtagcgttgaaatatggagttgcgagaataaaggaaatgaaagcttccctgactgatgaggaaatcctgaggatcgcgtcagaagttgaaatcttggaagatgatgaaatgaataagaagtatccgaaagaaagaggagcaagagtgacggtattattgaagaatggtgaaaaaattgttcttgagcagccaataccaaagggtgaatatgacactcctctaacagatgaacaatatcggcataaagctcaaagcattttagaagacaatgtagatagagccagaattcaggaaatttggaattgcatagttgaacaagaatgccagtgtgttgaatttgaaaaaatagttgggttaatgccataatggaggttaaaaaatatgaagctacaagaggttgcaagaactatcagaagtaaaaacgcaggttcatttatgataacagttgagataatttttaatgaacctaagtattacaattatataaaggaaaaccagcttatcacgcaaaagacaattgcagaagcatatgctcttccggaagaacaggtgacggatttcggttattatgatgcaggcatgggaattaaagcaaacttcaagcgtgaaaacccaagcggtggtcccggagaaagcgatgtttatggttgtcagcagtatgctccgttattaaagttggaatttcctgaatggaacttataaatagtaattattgaaggagattagatgatgaagaaaatcattttaggggcgtctatcggaaattgtgtacatgtggcaggggtagtgcattttctaaatctggctgaacaagaaggatacgaaactgtttttctggggccggcaatttcggtagagcatctgtttcaaaaaatagaagaatatcggcccagtatggtaagtgttggatatcgtctgactccatcaaatgtaattccgattttagatgaaatacaagagttaattaaagaattgccttataaggtaagatggacatttggaggaacaaaaccagttgcggaagtggcaaaaaaatatggtttttttgagtttatatcagatggattcgatgatataaaagattccatacgttttttacgcggagaatcacaaactgaagatgcacaatcatatgggagaagtttaatcgaaagaatagaaaaaagttatccatatcctattcttaggcaccatttcggacttccaactatggaagcaagtgttgaaggggttaaacaaattgcagattctaaagttctggatgtgatatctttggggacagaccaaaatgcccaacagtatttttttgcacaggattgcatggaaaaacaatttgacggggccggcggggtaccgattcggacaaaagaagatctggaacaacttaaagctgcttctcagagaggaaattatcctttaatgcgttgttacagcgggacggaagatgtttttaaatatgcgcagctcctgaaggatacaatagacaacgcatgggcagccataccactttattggtataatgaactcgatggaagaggaaacaggagtatagaacgttccttgaaagaagcgatagaattgattagatggcatgcagacagaggaataccggttgaaataaacgagcctcatcactggggattaagggatgctcatgatgttataccggttgcggcagcttacatcagtgcatataatgctaaaaaagcgggtgtaaagtattatatagctcaatatatgtttaataatcctaatggcctgtcattttcgatggattttgcaagggttttggccatgattgaaattgttgaatccctcgaagatgaaaattttaagatcttcagagaaaccagagccggattgccgctttttagcgcagatgaagcagtagcgaagggacagcttgcagcatcaacttttatgcagatggctataaaacctcatattatacatgttgttggattctgcgaggcggatcatgcagcaaacgccaaagatttaatagaaagctgtaaaatcgttaaaggagtgatcaggcacactttggatgatcaattttccatggaaaaggatgaacgtattataaaaagaaaaaatgaacttttgtcagaggcaaaggtattgttaaactatatatgtcaaaagtttcaagaatacaaggatccgttatcagatccaatcgtgttggcagagtgtgttaaacgaggatatatggacgcagctcatattgtgaaaggtggaaaatttcgaggtaacctttcaacaaagtttgaagatggtaaatgtgttgcatatgataaaaaaacggggaaggtactaagcgaaaaagagcgtttagaaggattggagaatgagcaaaagagaacagatattggtgcttggcgggggacaccaggggctggcgatggcagcacatttgtctttggctggggtgaaagtcaaactttggaatcgaacgcccaataatattcatgatattttggatacgcatataatagaatgctctggtattgtagaagggaaagcctggatagaacaagtatcctgtgagatcaaagatgttatttgtgatacaattatggttaccgttccggcatttgcacataaagatgttgccggaatgctcgcaaatcatgttactgataataccaaaatcatactaaatccaggccgcacatttggagctttggaatttatgagagaattgaaagctgtcggctgcaggacaactcctaaaattgctgagactcagacgatagtttatacttgcagacgcgacgacaggaataaagtcaatatatatgcacttaaggatgaagttgagattgcgactcctaaatatgaagaccttgttgatatcattgagagtattcccaaatgtatacgcggacgctttgtcgccagaaagtctataataaatacgtctatcggaaatgttggtatggtgcttcattgtgcccctgttttgatgaatgtaggttggattgaaagccgtgcggctgagtttaagtattattatgatggaatatcaaaatctatagctcaatttctggagaaaatcgacagggaaagaatttccgttgcagcggctcttgggtatgagatcgattccgtaaaagagtggctgcaggttacttatcatgtggaaggggtatctttatatgactgtataagaaacaatacaagttatcgcagtattgatgcacctaaaactattaaccatagatatttagaagaagatatcccttacggtctggtaccgctggaaaatgcagctaaactgattgggatagaggtcccgaatgtaacgttgattattgacttggcttcagctatcagagaaaaagattatagagcattagggagacatattgataaaaaagaattagatgaaatatgtaaataattgctcaaagtaaatatcttagctaacgataagaaagaaggataacaatgattccatttaatatacctccatatattggaaatgaagaaaagtatatgcatgaagctattctgcagagaaaaatttgtggagatggagaatttacccaaaaatgtagtgaatggcttgaaaaacagtcagacagtaaaaaagttcttctaacaacttcatgcacgcatgcgttagaactggcagcgcttctgtgtgatatacagcccggcgatgaagttataatgccttcttatacttttgtgtcaacagcagacgcgtttgtgttgcgtagagcggttccggtctttgttgatgtccgtccggacacaatgaatattgatgaaaatttggtcgaggctgcagtcacagccagaacaaaggcgatagttgtagtacattatgcaggggtttcctgtgaaatggatacaatcatggatatagcattaagacataatctcgttgtgatagaagatgctgcacaaggtgttatggctacttataaaggtaaggctctggggaacattggaaatttcggctgttttagttttcatgaaactaaaaactatagtatgggagaaggcggggcactgttaatacacaatgaagaggatatagaatctgcagaaatcatccgtgaaaaaggaacgaacagaagtcagttttttcgggggatggtagataagtatacatgggtggataaaggctcttcttatctaccgagtgaattaaatgcagcatatctttttgcacagttggagcatgccgaggagataaacgataagcgccggttgctatataaattgtattataagttgcttttaccttttagtgaaaaaggatatatagatctgcccgttattccggagggctgtagcagtaatgggcatatgttttatataaaagtaaaagatttagaagagaggacagcgttaatccaacatttaaaaaaacacggaataatcgctgcttttcattatgttccattgcattcagctccagcagggttaaagtatggaagatttaatggagaggatatttatacgacaaaagagagtgaacgtcttctccggcttccaatgtactatgaactgaccgaagaagaagtgataaaagtggcagagtatgttgggaaattttgggattaaaagtaattttggaggaacatatgagaacatatttagtgacgggtggcgcagggtttatcggttcaaattacataagatatatactgagaaggtataatgatgaagtctttgtaatcaatctggatagtttaacatatgcaggaaatctgcaaaatctggaagcaatagagcattttgataattatgtttttattaaaggggatatctgtgataaaaatattgtgcaaaatgtttttgaaagttatgagatagatcgagtaatacattttgcggcggaaagtcatgtagacagaagtataaaggatccggaggcttttgtgaagactaatgttttaggtacggcagttatgttggatgcagccagtaaagcatggcagacatttgaggggtatgcggaaaacaaaaaattcctccacgtatctacagacgaagtatatggttcattaggcgcagaaggatatttttacgagacaacaccatacagccctcacagtccttattcagccagtaaagctgcctcagacatgctggtcaagtcctatattgatacatataaatttccggcaaatataacaaattgcagtaacaattacggaccttaccagtttcctgaaaagctgattccattggtcattcataatgcactgaatgggaaaaagattcccgtatatggggacggccttaatgtaagggactggctgtatgttgaagatcatgcgaaagctatagatatggttcaggaaaaagggcgattgtttgagacttataatattggcggtcataatgaaaaaacgaatatagagattgtaaataccataattgatatattatatgagatgctgggtaaagaagatacaaggaagaaacatgtaagccgtgacttgatcacatttgtagaagacagaaaaggacatgacagaagatatgcaatagcacctgacaaaatcgggacagaaatcggctggcgtccggaaaccggctttagcgacggaataagaaaaacaattcgttggtatctggatcacgaagagtgggtagaaggtataacaagcggagattatcagaaatattatgaagagatgtacaggctgtgataaagaggtggaagtatgaagggaataattttagctggaggctcaggaacaagattatatccgatgacctatgcggtgtcaaaacaaatattgccggtatatgataaaccaatgatctattacccgctttcaactttgatgctggcaggaattcgggaaatattattgatttctacgaaaagagatgtgcctgttttccgtagtcttctcggagatggctcacaattgggaatatctattacatatgcggtccaggaagagcctaaaggtctagccgaggcgtttataataggtgaagattttattggaaatgataatgtagcgttagttcttggggataatatattttatggacagagtttttctaccattttggaaaaagctgcatctcttgaaaaaggagcattgatttttggatattatgttaagaatccaagagactatggagtagtagagttttcagatgaatatacagttctttctattgaagaaaaaccgaaaaagccaaagtctaactatgcagttccaggattgtacttttatgacaataatgtagtggacattgcaaagtccattgaaccatcctggagaggggaacttgagatcacgagtattaataatgtgtaccttaacagcggcgaactaaaagtaaagctacttggaagaggatttgcctggcttgatacaggaacgcctgaggcactgatcgacgccgcggattttgtggcatcgttccagaatcgccaggggttatatatttcttgtattgaagaaatagcatataaacgtaaatttatagaccaaaagcagttggaaagactggccaagcctattgagaagacggcatatggacagtatctgttggatattgcaaagggaaagtaataatgatggattatactgaggagcagatacagaaaatacagaaaaagagtatggaaatggctctttattttaaaaagttttgtgatgaaaataatctgctgttttatttctgcggaggatgctgtataggagcagtacggcataaaggctttataccatgggacgatgacgtggatgtatttatgcccagaagagattatgagatattaaaaaggatatggaaaaagaaagcggatacagacagatatgcactggaagattctaatgaatattatatcgaccataatctgttcttaaatatccgggataaaacaacaacatttatccgtccatatcagaaaaatctggatataagtcatggcctgatattggatgtactccctctggatggctgcccttccggtaagctgctacgtaaggcacagatgatatgggcaatgctgtattcgatgtaccgttcgcagatggttcctgaaaatcacggaaagatgatgaaattgatcggaaaagcggcactggctatagttccgtcttttaaactcagatacaaaatctggcgtttcgcggagaagcagatgacaaaatataaaatagaagagtgtaaatatgtaacagaattatgtgcgggtcctcattatatgaagaaccggtatccgaaagcggcatttgaaaaagcggtatataaagagtttgaaggatatatgatgcctgttccgcaaggatatgacgcatatcttaagattgcttttggagattatatgaagcttccgccaaaagagaagcaggtagctcatcatgatgtgcttatatgcgatttggagaaaagctatgagcactataaaggcagatattacttgatgtatcaaaagatatagtgtaagatatttaaagtaaaataaataagccaaaattaaagaggtgttttatggccaacagaagaggaagaagaggcaggcggcgcagaaagacaggcagctggtttacgaggctgagcactggtaaaaaagttggagtatgtcttggaggcgttgttttagctctggcagcttccggtgtagtctatgtagctgctaagcttggaaaaattgatacaaaggaaatcccccaggaggatatcataatcaatgcagaggcggaggaggccggagaaggctttaccaatgtggcattgtttggtgtggattccagagaaggtgacctggccgaaggtacacggacggactgcattatcgtgggaagcctgaacaataagacgaaggaaataaagatggcttcagtataccgagatactttgttggatattaaggacggcgagctgcagaagtgtaatgcagcgtacagttttggcggccccgaacaggctataaatatgctgaataagaatcttgatctggatatacagaaatatatcactgtagattttagtgttgtggcagaagttattgatttattaggcggcgttgaaattgatgtgaaggacgaagaagttcaatatatcaatgaatttattgatgagacaggagctgttgcgggtaaagaggttcattatgttgagcagggcggttcccagacactggacggcgttcaggctacaacgtacgcccgtatacgatcgacagccggcggtgattttacccgtacggaaaggcagcgtctggtcatcgagaaaatggtcgataagttaaaaggaagcaatcttgcgacgatcaatgatattgttgataaagtgctgccttctatatctacaaactttactacagcggaaatattgtcatatgcaaaagattttgcaaaatatacgttaggagaaaacacaggttttccatttgacaagactaccgatacaatctcaggactcggaagtatagtgattcctgtaacattggcagataacgtacagaagctgcatgaatttttatacggaaaatcggagtatgccgtatcttccacagttcagaatataagcggcagcattgtgagcaggatcggtcagcgtgaggcgacagatgacgagacactgaacagtcagacttattcaactgcgcccgaagacgcggcgcaggagaaggggaacaattacagcggaggagggaatacttatacgcctccaagtaacccgggaagttcaggaaatggaactggaaatgaaggaaacagcccaggaggagacaattcaggcggttccggcggaagcggaaacaacggcggaggcggagacggcggttcgggaaatacggaacagccggagacaggaggcggttcgggaggaacgacacctccggcacctgatactccgtctgaaggcgggacaacagaatagttatcataaattatcaatcgggatgcatgaagtatcccgattgatttttttacttagaaaataaggtttacaaattgttaagaatttgttacaatacaaactgatagtgcaaaaaaatgagccttttgtacaaacttagaagctgattatacaaaaaacggaggtacaaatatgtgtggaatagtaggatatatcggtgaccagcaggcggctccgattcttctggacggtctgtcaaaactggagtacagagggtatgactcggccggcatcgcagtttataatggtgaaaagattgatatgataaagtccaaggggcgtctcaaagtcttaagtgaattgacgcacgacggggagacacttcccggaactcttggtatcggccatacaagatgggccacgcacggatcgccttcagatattaacgcacatcctcattttaataaggatgagagtatcgtagtagtacataatggtatcatagagaattacttgaagctgaagaaaaagctggagagacacggatatgagtttgtgtccgagacggatacagaggtcatcgcacatcttctggactattattataacggtaatccgctccaggcggtcacaaagatcatgcaccgtatggaaggctcctacgcgctcgggatcgtatttaaggaccatccggacgaactgtatgctgtcagaaaggacagcccgctcatagtagggcacacgaaaggcggaaatatcatagcgtccgatgttccggccgtgctgaagtatacgagagatgtattcttcattgaaaatgaagagatcgtccgcatgacggactctacgatggaattttttaatgtggatgaggagatgatcgagaaagagtctgtgagaattgagtgggatgttaatgcggccgaaaagggcggatacgaacactttatgctgaaggagatgtacgaacagcctaaagcgatcacagataccttttctccgcgagtgaaggacggtaacattgtcatcgacgagctgaacatgactgaagaagaaataaaagaaatcaaaaaaattatgatcgttgcctgtggttcggcataccacgccggggtgacgagcaaatatatctttgaagggctgtcgcgcattccggtggaggtggatgtggcgtctgaattcagataccgcgatccgatactggaggatggaacgctcgtagtcgtcataagtcagtccggggagacggcagatacgctggcagcgctccgggaatcaaaggcaagaggagcccgggtgctgggtatcgtaaatgttgtcggaagttcgatagcaagagaggcagacaatgtcatgtatacgtgggcggggccggaaatagccgtggctacgacaaaggcttactcggcacagctcatatcgctgtatcttctggccatgaaatttgcttatgtcaaagagagaattgacgatacggtgctggctgatatgctggaagatttgaaaagtctgccggcgcaggtggagatgcttctgaacaataaggagaagatacagcggttcgccaaccgttatctggccgcaagagacatattttttatcggccggggcatcgattatgccatatctatggaaggatctcttaagttaaaagagatttcttatattcactctgaggcgtacgcagcgggtgaactgaagcacgggacgatatcgctcgtggaagagggaactctcgtggcgtctgtcctcacgcagaaagcactgtataagaagatgatcagcaacatggtagaagtgcgcacaagaggggctttcgtgatggcggtgacgatggaaggaaacacagaagtagagcgtgcggctgattacgttatatacataccggagacgaacagatattttacgaattctctggccataatacctctccagctttttggttattacgtgtctgtgggacggggatgtgacgtcgacaaaccacgtaaccttgcgaagtcggtcacagttgaataagtgtcagattaaggcatggtatatccatgcctttttatattcatgaagaattaatggaatattaagtagttctggttgaggtgaatggagaaatttgttataatatgttacatgactgttaaaaatagattaagaaataattatttcggaggatagatatggtatttggagggattcttgccggaggcataggttcaaggatgaatatggcggatatgccgaaacagtttttaaatcttggcggcaagccaatggtgatccatacactggaaaaatttttgctctgtccgaaaattgaacagatatatgtgggggtacatccgaactgggtggtccatatggaggatctggttggtaaatatatcaacataaggaaagaatgtgtccacattataccgggcgggggcgaccgcaattccacgatcatgaatatagtagatgcagttgagcgggattacggagaaagtgaggaacattaccttatcacgcatgattccgtcagaccgttcgttacatccagaattctcaatgacaatgtagaagcggtacagagacataaggtctgtgatacggtaataccggccacagacactatcgttgtgtcagaggatggcagtatgatcactgatattccggtgcgtagcaaaatgtaccaggggcagaccccacagagctttcaggttgatctgcttaaaaaattatatactgcgctgaacgaagaggagaaagcagtccttacggacgcatgtaaaatcgcagttgtccagaatgaaccggtctatctcgtaaagggggaaccttcaaatctgaaggtgacaacagtgagcgactataaagtagcgcaggcgatggtcggaggaaaagtcgttgattaattatgtatatcagttggtagcgccgggtacgttttctgtcaaatatgaggagacccagttcggggatcaggtggtcatcaagccgcgttatatgtcgatctgtcatgctgatcagagatattatacaggacagcgcgagcgtcatatccttgacaaaaagcttccgatggctcttatacatgagtgctgcggggaagttctttatgatccgtcggggaagtataaggcgggagaggaagttgtgctcataccgaatgtgccaggagagcacagtgatatcatactggagaattatgcaaagggagcgggatttctctcaagcggaaaggacgggtttctgagggagttcgtcagtctgccggaggacaggctcatgcgtcatgaggggataccgcagaagctggcggcgattacggaatttataagtgtggcggcccacagtatccgtagatttgacggtatttcccatgaaatcaggaacagaataggcgtgtggggggacggaagcctgtcttttatagtggcgaatctgctgaagcaggcatttccggcaagtgagattatcgttgtcggtaaaaatcccggaaagctttcttactttacctttgcagatgagactgtgctgagagaagaactgccggagtcgtttgaggtggatcatgcatttgaatgctgcggcggcgacggcagttattatgctatagaggatattatacggtacatcaatccacaaggtacggtaatgctgatgggcgtgagtgagaaccgtgtggcggtgaatacgagagatgtactcgagaaagggctttcagtgatcggaagcagccgttccgggaggccggattttgagcaggctgttaattggatgaagaacgaaagatttcaaaagcgtctggatatgataatatttgaagacgataaggtcagttcaatagagggaattcacagagtttttcagaatgacagaaatacgccgtttaaaacagtgttcgagtgggggctttaaggagttagtttattatgccagaaattagtattatagtaccggtttataatgttgaacaatatttaagtaagtgtttagattcagttctttgccagacatttgaagattttgaactgcttttgattaacgatggctctacagacaattcgtctgaaatttgtgagagatatgcgaagcaggatgatagaatacattatatgactcagaagaatcaggggcttggcagaacaagaaatgtaggaattaatgctgcggccggatcgtatattatgtttgttgacagtgatgattatatagctgagaatatgcttgagatattatatcaaaatatattatttagcagcgccgatatagctgtctgtggactgtataatgtatataaaacaagatgtatgcctcagtgtgatcagattgaacagtttacatgcgacaatgtacaggcatttaagttattgctgatcggagagaaaattccgggaagttcatgtaataagctgtttaaaaaagaactgttagaaagagtaaggtatcccgaaggaatattatatgaagatgtagcatttcatacttcacttatgcaggcggttaaaacagtgcatgtggatacaacacctttatattattatgtgcatcgtgaaaacagtataacaaccgaaaagtttaattcaaggtcaatgatgtttatttatgcttatcgtgatacactccgtcttgtcgaggataaatatccctctgtactgccggcagccaggtttaagcttttctgggcatattttgcgatattggacaggatactgcaggcggatgattactggaaaatacccgagtataaacaagttataacgtatttgaaaaggaatacgatacgtataattaaaaatccatattttcgtaaagcaagaaaaatgggagcgcttgtattgctgatgaatgtacgactataccgtactttgacaaagataaatgaaagaagaagcaaagagctttttgacaggtagaggaaatgaaaagagtttgttttgtggattttgacatgtcggtaatcggaggagttgaacaggtaaccgcatcgctggcaaatgaattatgtaagatatatcctacttatctgtacacaattaataacaatgccggactggcttataatctggatgaaaaaattatcataaagcagggactgaccggtgagaagcggctccgcggaatgattcagagaacattccggccttttatccattatgtcaaagagaaccatattgatacagttatactgatgggcaattatccggcgctgatcgtttccttcacacgttttttcacaaaggcgaagtatatatactgtgaccacggagggcttatgaaccagtggaagcagaaggacattacggcgatccgtttctgggatgcgcttacgtcgcacaaagtcgttgtcctgaccgaaaagacgaggaaagactatatatccagattccatacaagacccggaaaagtagcgtgtatctataactggatcgaagataaagtggccgcagcccgaacggattataacgacagctcccggaaaattctgtctgtcggccggtttgggaaagaaaaggggtatgatatgctcgtggagatggcgaagactgtactgcctgcgcatccggactggcagtggcatgtgtacgggaccggcgagacttttgaggagacggctgccaagatagcggaatacggtctgggatcccagcttatcctgaaaggaaatgtaaaagaagcgtacaggctgtattcggagtatgcgtttctcgtcctgccttcctaccgggaagggcttccgcttgtgctgctggaggcatctgccgtcgggcttcctatgataagctttgatgtggaaacaggtccgaacgagattattgaggatgggcggaacggttttctgataccgccgtatgagctggaaaagatggaagcaaagatagaagaacttatctcagatggcggcaaacgcagaaggtttgcagagtatgacggcatgagagataagttcagtaaagaaaagatcctgaaacagtggatagaagtgatcgaggagtagtgatgagaagcagacaagcgatgaaaaatatgatcgccaatatatttcttcaggtgatcgtatttctgtcaggtatagttcttccgcgtttttttctggaagcatacggctccagcataaatggtatggtgacatcggtaaaccagtttctcatttaccttggcctggccgaagctggtgtcggtacggcctccgtcgttgccctttacggtcctctggccaaagaggatcaaagcgggataaacggcatcttatccgcgacgagaaggttttacaacagatcgggatatctgttcggcgcgctcgttgcgggatttgtgttcatatatccatatcttatcacccagcagctgagcgcatctcttgtgcggactatgatattgatcctggcgagcagcactttagtagattatttctgtctcggaaagtataaggtactgctcacagccaatcaaaagggctatgtgatcgcttatattcaggcgcttgggacaacactgaatatggcagttaccattgtcctcatatataatcatgccaatgtgcttttggtaaagggaatcgctacgcttgtatacattctgcggttctttctggtaaaagcatatgtcaggcgctggtataaagaggtagattttaaagcggagcccaaaatggacgggctgaagcagcggggagcagcgctgctccaccaggttgtaggggtcatcgtcaacaatacagatgttgttttgctgacggtatgtctcggaagtaagtccttgatagaagtgagcgtatacgggatctataatatggtcatatatgccatgaatcttctgctcacctcattttcaaacggtctgaccgcagggttcggagaggtgatctccaaaggcgaaaagcaggtgctcagagacagctattcaaattacgaatacacgtacatgatcatactcatgtgtgtctgcacgtgtatgggcgtgctgcttttgccgtttgtgtccatctacacgctgcatgtcacggacgcagactatataaggccgttttctgccattttatttacgttgatcatatttttgcagaacgtcagaataccggggctcacgatcatatgcgccgccgggcattttaaagagacgcgaggacaggcagttctggaagcagcgatcaatatagtggtctctttatccttagtgtggagattcggcatgaacggcgtgctgttcgggaccgtatgttcctatgcgttcaggtcggtagagataatattgtacaacaggaaatatctggtggaaggcacaggaaagagtacactaaaaagaattctgcggaatgtactggcggtcattgtcatcatatgtgtatttataaatgtggtaccgcagcagatgacctcatttcttacatggggtatctacgcggtaataacgggcggcgtttccatgatcattctgctcggcctgaattatatatgtgagccggcagaatttaaaaaagtagtgcagagaatgaaaagtataggaagacagagaggatagaaagaatatgtatgattatctgatagtaggttcagggctgtttggttcaatatttgcctatgaagccggaaaaaaagggtataaatgtctcgtagtagagaaaagagaccatatcggaggcaatatttacacaaaagaagtggaagggatccaggtccacgagtacggcgcgcatattttccacacgagcaataaagaagtgtgggaatatatccggcagtttgccgaattcaacaggtatacgaacagtccgattgcatattataaaggtgagatatataacatgccgttcaatatgaatacgttcaataagatgtggggcgttgtcacgcctggacaggcacaggagaagatcacagagcagatagagaagtttggcgttgaagaaccgaagaatctggaagagcaggccataaaccttgtggggaaagacatatatgaaaagcttgtaaaaggttacacggaaaagcagtggggacgcagagcgacagagttaccgcctgagatcatcaagaggcttccggtgcgtctgacttatgacaacaactattttaatgactgctatcagggcataccggtcggaggatatactcagatcattgaaaagatgctggacaaaacagaagtacggctgaatacggactatctggaagagaaagagcagctcgataaaataagcaggaaagtcgtgtatacaggtccgattgatgctttttacgagtacaaatatggtgaacttgagtaccgttccgtcaggtttgagaccgaagtgctggatgaggagaatcaccagggaaacgcggtcgtaaattatacggagtatgaagttccctatacgaggatcatagagcacaagcattttgagttcggcacccagccgaagaccgttgtgtccaaagagtattccgcgccatggaagcggggagacgagccgtactatccggtcaataatgaaagaaataacctgctgtatgaaaaatatgccagagaagcagctgaggaagaaaaagttatattcggcggaagactcggcagatataaatattatgatatgcaccatatagtagccgaagcattgaaatgcgcagaggaaaacctgtaaaatttattgaacttcagcagttcaataagcatgagttgcggattgttccataatatagtaatataatgtaggattaatgagcaaaaggtaaaaaaggatctgattatggcgaaaaataataagtctctgaaggccgaaaaagcgatcaaggcaaggagaaagaaaaaacagagaagaaggcgcagagcggtcgtactcgtggtggaagttatcatgctgcttctgttatcaggcgttgcatatgcaatgctgaagtttgataaactgcaggcagtaaatattgataagaaagatctgcagcttaatgagggcgtggaagagaaagaaggatacactacaattgcgctttttggcggggattccagagatggacagctggaggaaggtacgcatgcggatactattattgtagcagctatcgacaataaaactaaagagataaggcttgcttcaatctaccgggatacacttctgcagcagaaaaatatgagctataacaaggcgaatcatgcttattttgcaggcggaccggcagaatccatcagtatgctgaataaaaacctggatcttgatatacaagattatgtgacggttgactttaaggcgcttgtagacacgatagatctgcttgacggtcttgatattgacatcaagcaggaagaagtacagtatatgaatgaattccttcaggagacggcggatgttgcaggaacgaaagctgaatttattacagagtcgggaaaacaacatttggacgggacacaggcagttacatatgcacgtatccgttccacggccggcggtgattatacccgtacagagcgccagaggctggtgatcgagaagatatttgaaaaagtgatgcacacagacctggctacgatcaataagatcatcgatacagtatttgaacaggtgtctactagtttttcgctgaaggagctgatcggcctggcgtcagatgtcacaaaatacaagcttggtgaaaatacagggtttccatttgatgtagaggatgggatcacatatcagaatgcaggaagtgttgttgtcgcgctcggtcttgctgaaaatgtaaagcagctgcacgagtttttgtatccgaacgaggaggccgggaacgtatctgagaccgtccggaatatatctgatgagatagcttacgtgaccggagttgtgcggcccgcaactcttgacgagaacaaagacggggaaagcggaaatacagataccggcaatgatgcaggcggtaatacgcagggagcatatggagaaggaacatccggcggcggaactgacgataccggaacataccaatagaaagattttttgtaaaatgatgtcagatgtgatagaatatttctaacattgatgatcagaatcgaaggagaaagaggataagaacatgaagatattaaagaagatcagcataattttattaagtctgtgcttatgtgtcccttgcttttcaatggttgccgaggcggccgacgggcggatatcttttacggacccggagacggcggtcggtgaaatggttgaagtaaagtgtgtggtcaagtctacaagcggcagccttggcaatatagaagtgaaactgacgtatgacagttcggcgctcaggtttgactccggcgacggagtcacggcagacggcgacggcgctctcacctgtacaggctccggcggttcagaggaggcgacttttaatataaagttccaggcgcttaaggaaggcgatacgagtgtcagtgtgtcaagcgcaacgatagcgtcaagcggaggcggaacgctcacgctggaccagggaagttccgcggtcaaaattgcagaaggggacccttccaaaattacagacggcggcaatacttccagcgcagatgatattgatgtagaagtcaacggaacagcttacaaattatccgataactttgcggaggcagacattccggcaggctatacaaagacggagatccagtttgaaggccaggcgcgtcagatggtggcgcaggaggccagcggcatcacgctcggctaccttctggacggtgaaggcaaaggggatttcttcctgtataatgcagataatgcgaccttttctccatttgaacagataaatatttccgatacgacatccatagcgctgctcagtgagaaggcgggaggaaagctgccgaagacattccaggaagtgacgcttacgctgaacggtaaagattttcctgcctggcagaatacggaaaaggacggtttctatgtcgtatatgccgtgaacagtaacggtgataaaggatattaccagtatgatgacggtgaaggcacttaccagcgttatgaggcagctgatacagcagaagaaaagacagacaactctctgatgggtaagataggtaactttatagataagcacatacagatgatggtccttatcatagggctcggcgcgctcatcgttcttatcctcatcatcgtgctggcagtgaagctccacaaccgcaatgcggagctggacgacttgtatgatgaatatgggattgacgaggaggaagagccggagaagaacaggcctgccgttaaagacaagtcagctacaaggtcaggacttaaaaagaagaaagaagaggactccttcgatgattttgaagaggatgattttgacgaagacgatttcgaggacgcctcttatgacgatgatgactttgaagactatgaggatgatctgatcgatgaggatgattttgagccttatgacgacggagcgctgtatgatgattctctggatgatgatattgatgatctggatgacctgctgagtgagtcaaagacgaaaaagcgcggccacatggagaccgacgatatgttcaaggttgactttattgacttggattgatcaaggtatgaaataaaaggatattatcccaaagatcgtgtaaacctccaaactgatgtaagataattacaacaggttggaggtattattatgccaaaaagaaaaagcataatgcagataagggcagataccggaaaaccggctctgccccatgtaactatcaacatatcttatatcagtttttctgtttacacaaaacttgaaacaatctctaattagatttttattcaaatttccatgttaaacacatataattcattgtactgtacactgtgatctcaaatatttttttgtctttcaatttccatctgtatttatgttctacacggccgtcgccttgtgttgaagagtcgctatgttctccatagagtttatcatactgtttgatgatagtatctctcgtattgtcatcaaacagttcctgttcttcattacctgaaccggtactccaggacacatagtaaatatcatatggcgctaatccttttatctcggcatcaaaacacctgtattctgtttcgccattcatatcattatatacgacactttctcttcctgacagtaaagtcccgtcctctttaaaaagtatggacatagagtcctctgtcatcacaatgtcatctaaatcatcagcggacgtgcctaaaacattactgtaatctaatggtgcgtcataatctttagtcaaaaaaatctctattagtagaaagaaaataaaaatcagtgccacaacagcaattataattttttttactgatagtttcttttttgttttgttttcattactaaacgctgcttcattcagcgggcacccgcaattcggacattctgttgctttggttgatacgtcattaccacattcaggacattttatcagagccataatttctctccttttattccgtatatattttcatggctgcataatatttcactacagcagaatctgcgtcattaaaattacttgtaaaagtctgcaaatttccagaaggattgacgactaaatttatgatctctaaatatgcatcataatagtctttaattgcgttatatgcttcttgatattcctcagggggatcttgcagctttttcattatccgctccacatttgtctggtttgacttcactgcgctgagtctgttctgataagtggaatctgcaaataatttatttaatgaatcattaaaatcattgttgaatcttccatctgtcttagtatacatgtctgttgcagcgtcacttttttcaaagatcgtattagaccagacatcgtggatcaatacgcccagtttttctgcatcagacgctccttttaacatagttgtggtagccgttttgatgtttattccataattttctgatatctctatttttttgttttcttccgcttttttattatagctgtttacaccaaatatgataattaaaagtgcagctataattaagactgttattattatgagctttttggaaccttttttctttgatcccctttcacttgtctcagttgagaccggacaaccgcatttgtggcatatgagcactccttcatttaactcctgaccacattctttacacactttttttggcggttctcttaataatgtttcacaatttgggcatttttcagccttatcactaacttcctttccacaatttggacattggatcaacgccataactttacctcccatacacctcatattttccctttaaataaatacaataaagtattatatattgtaataatattctaccatgtattgttctgctaatctactaaattcgtcaaaaacagactatatctgaataataagtaaaaataatccaaaaatcagtaaatagatattttgttaggaaggaatcaaaaatataataataattgtgttataaactgtgactatattcttattgcactaaaaaaaatgtgtggtaaaatagtggaaatctatcgatggtacaaaaagttttcggtgatataatttgaattatgtgtaatatctgatgcatttttaacaagtttaccggaaaggattcaggtgagttgtacatggagaaaaagaagatacagaccgacaaagaaggaaaggaactcagacagcctttagacggcaagttccccattgccgcggaatttcagaagctgtcgtactatgcatacggcctgtgtatcagccactggcacccggagatggagctgctcgtcgttacggagggagcgctggaacagcggatcggggaggagacacatatgatcagggagaacgagggagtctttataaacagccatgtcatgcacggggcgagaatggtgaatcgtgaagactgcagttaccgtgtgatccggtttgagcccgcgctgctcggaggaaatgcaaagagccttatatatgagaaatatgtgaaaacgctgcagtcgcaaaaggatctgctctatcgcattgtgcgcccggaagatatacagcagagacggatgatagacctgatatataagataacagatacatacgtcaaaagagaagtctgctatgaactgaaagtccagcagatgatgctggagttatgggaacttctttacaaaaggacgggacatgtggaagaaaatgcgatccagatgaacagggagctgtataaaatacaggatgcgcttgcctatatacagatgtattataagaacccgatgacgctggaggatatcgccggggcatgcatgctgagcaaaagctcttgctgcaggctgttcaagaaagtgttccgtcaaagtcccatggaatatgtgacttcctacagaatccagcagagctttatgcttatcgcagacgaccggtattctataacagagatcgcatacgagtcaggctttacgaacagcagctattttacggaaatgttccggaaagtgatcggcatgacaccgacacagtataaaaaagaaatatgcggaaaatagagaaaaggcattcggatgaaaaagacagtaaattcatctggatgtctttttttgtgtgtcaataggcgggaattaccaactctgttatgaaaaatgaaaactatgttatatcatacaaacaattatgtaaatataatgaaaatacataagaacagtctgtttcatgcagattgtacagtttgaacgataaatcagtgtgaaacggaggtggacaggcggaactatattactgggactgtatgatacaggcggaaatgaaaaagtttatacaaaggaggaaaagtatgtctaaaagattaaaaagtacggcaatattgttggtcatcgtatctatgctcgtatgtgcgtgttcgtccgggggcggaaaagctgacacagagaagacggaaaaaaagacggaggacagcggcaataaagacaagatcacagtcggcgcaacgctgagtgattttacgatcagctttcaggcggccatgtacaacgagcttctcgatgcgcagaaagagtatgacaatatagagtttattctccaggatggcgcttcagattctgcgctgcaggtgaatcagatagagaccttcatcacacagggggtggacgccatactgatcaacgcggtcagcgacgcggtggagccgtctctgaaaaaggccatggaggcggggattccggtatttgccgtaaacaggtcgataacagacgagaacgcctacagctacttcatcggtgcgaacgacacgctcagcggcgagcagatggcaaactgcctgcttgacatgatcgagaaggaccagatggacagctgcaatatcctttatatccagggtgtgatcggcgccacataccagacgctgcgccagggcggctttgacagtattatggaggaaaagggatatgatatgggtgtcaatatactggagcggattccatgtaaacacgacaaggagacggtcatcagttctatccagaacatgctgaacaagtacccggccggagagatcgacgccattgtatgtgaagggccggacgacgctgtgggagcgcttcaggccgtacagtctgcggggcgtacggagcttgtgggcaagatcgtcggtatggatatgccgacagaagtgtgggatgccatcaaggccggcaagatatacggcacagtgcttcaagatcctgcggagcagtgcgaagtcggtattaagacaatagagacatatttcttcggagataaggactccctgaaggaaaagtttatcgagacagatcttcctatggtcacttcggaaaatgtcaatgatgtgacaccatcctggtaaaggaccgggggccgcggcatacgggctatatgtcgcggcccctgaacagtcggatatataacattgaaagggcgtggaatacagatgggtaaagaagaagcagaaaaaaagaaaaagttcaggatgaagcgggaatataacatgctgctcgtgctcgtagtcatgttggtcgtgtgtgcgttcatttctccgactttccgtactgtccagaatctgatcaacttgttagggcacaatgcagtctatggtcttctggcggtggggatggcatttgtcatcatcacaggaggcgtggatctgtcggtcggttcagtctgtgcgctgtccggggtgatgtcggcatatgcgttcattgactacggctttatcgcgggtctggctgcgggactggcggtcggcatcgtatgcgggttcgtcaatggcattttgcagactgtgataggcatgaatcactttgtggccactctcggaatgatgacgatcgcgcgcggagctgtctatatcattacgagcgggttcaacatctatgggatacctgaggcgtacggcgtcgtaggcatgggctatctgggcccggtccctgtggcggggatcatctggctggcctgcgttgtcatagcgtttctcgtgttgaagtacacgagattcggacagtatgtgtacgccatcggcgggaatatgaacgcggcatggctgtccggtatcaacacaaagctggtaaagacggttgtgtatgtgatctgtggtttttttgcgggcctcgcgggcgtagtcctgtcatgcaggacactgctggccgcggcaaatgcggcagatacatatgagctgaccgctatctcagcctgtatcgtcggaggactgtctctggacggaggcagaggaaatgtgtggggctctgtcgtaggcgtgctcattctaggactcattctgaacattatgcagcttacaagtgtgtcgagttactggcaggatgcggtcaagggtatcattatcataggcgcggtagcggtagactgtatgtccaagcttaagagagactgaggtggtatgggatgaaggaaaatgttttggagatgaaacatatatcaaaggacttcagcggagtcaccgtgcttgaagatattgacttcacactgaggcagggagaagtccacgcgcttgtaggagccaacggggccggaaagtcgacgctgatgaagatcataaacggcatctgggcgcggtattcaggggaagtgtatctgaacggcacaaaggtgagatttaagaatccgatcgacgccgcgaaacgggggatcggcatgatccaccaggagcttgacctgacgccgaatctgaccgttgcggaaaacatatatctcggaagagaaccgaagaagagcggtacgatactgatagataaaagaaaaatggccggggaggcgcagaagctgcttgatgagctgcattttgacgtggatgcgggggagaaggtcgtcaacctgcccacggcaaagcagcagcttgccctcattgccagaaccgtatccatggaagcaagccttatcattatggatgagcccacgtcttccctgtccatatctgagatagacaatctgttccgggtgatcaaggagctgaaaggccgcgggatcagcatcatctacatttctcattttctggaggagatattcaaaattgcggacagggtgaccgtgctcagaaacggcagactcgtcggcacgaagaacgcggcggagactcaaataggagaagttatctccatgatggtcggtgaaggccacacacaggataagaaattctacagagaacatccatcggacgagatccatctgaaagtagaaaatatgagccaggtacaaggccacgtacacgatatcaattttgtgctgcataaaggagagatactcggtatagccggcgtcctcggctcagggagaacggagatcgggaagatgatcttcggggccatgaaaaaaagacccgggtatcagctggagctcagcggcggggcctgcgccatgaagagcccaaaagaggcggtgaaccggggagttgcgtttgtttctgaaaaccgtaaaacggagggcctgatcatgaaagcctctcttcttagtaatatcgcgctcgtaccgctggcaaggcagaggactccgtgggtgaaccaccggcgtctggaacggacggcaaagacgatgggaagcagaatgagcctcaaatattctgccatgagccagacagcggattcattgtcgggcggaaaccagcagaagatcgtcctgggcaagtggctggccacagacatcaacctgctcattctcgaccagccgacacggggaattgacgtaggggcaaagaatgagatctatgcgctggcagatgaactggccagaaagggaacgtccatcatctatatatcagacgaactggaggaactgtataacctgtgcgaccggatactcgtgatcaagaagggcggcatcgtggcagacatggagaactatgacagacaggtgacaaaggcagaattgtttgaaaagatgatcacggacaaagaaggagagacggttgatctgctttgaaagaaagagaaagaaacagccggtgacaggagggatatgatatgagaggattgcagctttgcggaacgtggaaaccgaggcgtggatatacgcccacgcagagggaaatagaagacaaaagggcgctttgcggaaagaatatatggtatgcgccgaaaatcgaagtgacagagcttccgacgcctgagcctgcggacgatgaagtgctgatggaagtcggtgcctgtggtatctgcggttccgatacgtgttttcttgacacagacgaggaggggtatctggactacgtaggccatacgagactgccggtaatattcggacatgaattttccggcagggtagtggcggccggaaagcgtgtgacgaggtttaaggaaggggatctcgtcaccgcggagacgatgaactggtgcggaaaatgtatgccctgcaggaaagggatgttcaaccagtgcgaaaacctggaagaaataggcttttcattaaatggcggttttgggcagtatctgacggctaaggaaaaatactgtcttgatatcaaccaatttaaggaagtatacggcagcgaggagaaagcgctggaagccggcgcgctgatcgaaccgacggcagtggcctataacgggatgttcatccggtcaggcggttttcttccgggcagctatgtggccgtatttggcgccggtccgatcggactgagcgtggtacagctggccaaagccgccggggcggccaaagtgatcgtgtttgaatactcggcgccgcgtcttgagctggcggccaaagttggggctacagatctatgcagcctggcacatatcgcttcgcagggcggtacgccggcggatgcaatgagagaactgacagatggaaaaggagtgcatatggccgtggaatgtacggcattctgcaataaaaatattccctatatccagcaggcgcttgctgtgggcggaaaagtggtccagatcgggcatcacgcggggcggaccgagatgttcgggcagtattttcagaagagcggcgccgcgctgtacggaagcaacggcagttccgggcacggaatatgggagaacgtaatacgcctcatagcttccggccagatagacccgggtaagctcgtggaaaaatgctttacgctggatgaagcggcagaggggcttaaggaggccaaaaacggaacaggcggaaagtatcttataacgccgaaccgataatttcagatgagagacagacggaggtaggagaatatgaaagctttacaggcaactggcacgtggatccccaaaccgggttatgaaccgacagagagggagaaaagagaccggcgcgccgtcagcggagaccgtatatacagccggccggtcattggatttgtggaaataccggtgccggaaccaaaggacgatgaagtgcttatgaggatcggcggtgtgggcgtgtgcggttcggacaccacattcctcggagcagatgaacagggatattcgcgttatgcgggccactgcaggttcccgtgcgttatcggccatgagtttgccggggaggtcgtaaaagtggggaaggcggtcacgatgtttaagccaggagaccttgtgacggcggagacgatgaactggtgcggggaatgtgaagcgtgccgtatgggaatgtataaccagtgcgagaacctggaggagatcggatttacactggacggcgcatatgcggagtatctcgtggcgaaagagaagttttgttttgatatatcggcgctggaacatatttacggttccaggagcaaagcgcttcatatcggcgcgctcatagaaccactggcggtggcttataacggaatctttgaaagaggcggcggcttcaaaccgggaagtgacatagtcatcttcggtgcagggccgatcgggctgtccgctctgtcgctggctgccgccgccggggcaggcagggtcatcgtgtttgaaaagtcagctgcgagaatgaaactggcagaaaagatcggggccacgtacgtatgtgatattaacggactgctggcggagggcttaagccccggacagaaggtgcttgaactgaccggcaaaaaaggggcggaagtctttattgaggcgacggaattccagagggacaatatcccggagatagaacgagcgctggccgtcggcgcaaaggtcatacaaatagggatctcatctaaaacgatggagatggatgtagaaagacttcagatcgccggagccagctatcacggcacgatcggcagcgccggccacggtatatggcagaacgtcatcgcgctcattgcacagggcagagtagatccgcagatctatatgaatccgcgcatctacacattggaggaatcacttgaggcgatagaagacgcggcaaagtgcggggcagggaaaaatgtggtagacccgggcctcagggcataggaggagagaatacactatgaaaaaactgaaaataggactgatagggatcgggtatatcggatgcgcccatgtgacggccatccgcaggtgccccaatgccattctccatgcggtggcagatacagaccggcagctgcttgagaggaagaaagaggaactggggctggaaaaagtatacgacaatgtggatgaaatgctggcagatccggagatcgacgtcattcacgactgtacgccaaaccacatgcatctggaactgaacagaaagatcattcaggcgggaaagcacgtattcagtgaaaagcctgtggccgcttccgcaaaggagtctgcaaagctgcttgacatactcggcgagaacccggatatcgtggccggcgtaaatcacaattaccgcatgaatgtcatggtccaggatatgaagcacagagtacagtcgggtgagatcggaaggcccaggttagtctatggctcatatctgcttgactggcttttgtatgacacagactatgactggaggctggagaagaaatttgcgggaaagtcccgggcggtcgctgatataggcacacattggatggataccgcccagacggtggtcggagccaggataacagaagtgtttgccaatctggagacgatgcttcccgtgaggaaacggccggtaaaaaacagtgcgtcaggagagataacttatgaagagtatcagatcgacacggaagactacggcgctgtttttgcgcgctttgagaacggcgcgtttggactcttccacgtaagccagatatccccgggaaagaaatgccgcctggacctgacggtggacggcgagacggattccctgtactggaatcaggaggaggccgaccgcctgtgggcaggacacaggggcagagggaacgaatatattttccgcgatccgaagatgctgccgcccgagactcttccgtatacctatatgccggccgggcacccggaaggatggaacgatgcggtatacaataacatccattctttctatacgtttattctggaggggaaaaagcccgggcgcgacaagccggattttgccacatttgaggaatgtcactatctgaaccggctgaccgaggcgatcctcgagagcagccatacaaaacaatggatccgtctggaggatgaataaaggaggacagggtaatgaaactcggattgtgtacaggaacgtattcggatctgccgctggatgaagtatgccggcttgcggtccgctacggatatgaaacattggaaatcgagacatttgagagggacaatctgcatctggacatccatacgatctttgacggggacaatatccggaagttcaagaagaagatccaggattacggacttgagatatccaccctcggaaaccacccggagagccagctcgtcatgggaccgttcgggcgggatacggacgatatctaccacgggacaaaagaggagaagataaagttcggcaccgaagcagtcatcagggcggcccaggcggccaatgagatggagatcccggtcgtcgtcggatttaccggctgcgagaactttggccgcgtatgccagtggccggacgcgcgggcatgggagcgggaagaagagatatttgcgcagcgctggggcaagatacttgacaagtatgacgagtacggggtcaaatttgcccatgagccgcacccgaatcagatggtgtacgatatcgagaccgcacagcggagcgtagaactgctcgggcagcgcaaagcgtggggctttaactttgatccggccaatatgatgatgtacgggatcgatgtggaggcttttatagaccttcttggagaccgcatctacggagtacatgcaaaggacgcccagatcgtgaagcagaatgcggggcgttccggtctgaacccgcatggaaattaccggaggatcgaccggggattccgtttccgtataccagggtggggaaatgtaaactggcaggatgtcatcacggagctttcgatggtaggttatttcggcccgctgacatttgaacatgaagatattacgatgagcaggcaggacgggatgaaaaagacggctgaatttttgaagcctttgctgatagacgcgccgtttgaaggccgcagcgacttgaatttcaggttttagcagtctgcccccatttgtcataggcatgaaggaaagaggagagagcacatatgaaggattgtgtaacagcagcagtgatagggcttggcaggatcggaagaacacatgcggagatactcgtaagccgtgtcggcagcgtcagggtaaaatacgcggcggatgcatttttgaacgaagaaatgaaaaagtgggccaaagaactggggatcaaaggcgtgacagacgacccggaaatctgcctgcaggatccggaggtggacgcggtctatatctgtacaagtacagacacacattcagagtatatcacccgcgcagccaaagccggaaagcatatattcagcgaaaaaccactggattccgatctggtgagattaagcggcgccctgagagaagcagaaaaagcgggcgtaaaattccagaccggctttatgaggcggttcgacagaaaccacagtaaggcaaaagcgctgatccagtcaggaaaggtcgggcgtgcgcagatgataagactgtcgtgcagagatacggtacagagcccgtacgaatatctgaaagtgtcaggcggcatattttttgatatgatgatccatgattttgatatggtgagattcctcacagacagtgaagcggaggagatatacgctgccgggggcgtttttacggacgaacggctgaacgacattccggatgtagatacggccgcggccttcgtgcgcatgaaaaacggcatgctggcagtcattgacaacggccgccagtgctggtacggccatgaccagaggtcggagatcttctgcacggaggggaccgtgcaggtcatgaacgagcatgaggatacggtcgttgtcaaaaaaggtgacggaatatacgcaccgaagccgccggatttctttatagaacggtattacgaggcgtacgtggcggagaaccagtcctttgtggacagcattctcttcgacaggcctgccgcagtcacggctgcggacggagtggagccaatcaggatggccaaagcggctcagttatctctggaacaaaaccgtccggtaaagctcagtgagatcacagaatgccgcatcgtttagacggaaacaacgataagatggaaaataatggaaacggttcacccctgtccttttgatataatttatatcagaaggacaggggtttttgacgcgtcagttcatcagattttttttgtactctctcggcgaacagcccatgtatttgcggaagacttccgaataatagctggagccggaaaacccgacctggcttgcgatttctgtgatgctgcatgtatcggtgacgagcagcggaagacttttttgtatgcggtaccgcagcagatattcaaacggtgtctggtgcagtgttttcttgaagatacggcagaattcacttttgctcgtgtggcacgattcggccatctggtcgagggtgataggatccgtatagctgctgtggataaatataatggcatttttaagccgtgagatctgctttgcttcagccagtccagctccggagggaagctggctgcgctggaactcttcaaataataatgcccagagctcacagagccggcttttgatatgcagctcataacaggcgttttcttctgtataaaatgcagccatttctttcatgatcttctgaaacgtttcatttccgtctgctccgtcccggaacacaaaggaggtgaagttatccgtattgagcagggggaacgtgtagtttgtatcgatatcgctcttttcatatccatagatgagagaagggttgaaagtggcgacgatatatttacagtcattattttcaaacatacagccggaatgcagtgcgttggaattgacaaagaggcagtctccctttcccagctgatacaggttctggttcacctgataggtcatagtgccttccagtatgcaggcgatctcaagctcggggtgccagtggcagttgaaacggccgaactggtaggcggaaagggtgacatatatcaggtagaaggggaaaccgtaattgccgtgcgggttcaattccagcatatttttgtcggtgataatctcacgaatcataacatacctccataaaaataatattgttattttaaataggaatataattatagaatataaaactggttgttggtacaattatactactaaaatgagtataatacaaataaaacagataaaatatacaaaaaataagatacattttctttgttgatgtattttgacacaaaaaagctacttaagaagattgttattaaattagcagttttgttatagggaggtctgttttattaagtatagggaaccatgaaaattacattcaaaggaggagatgaaaatgaagaagttgaggattggcgctatcggggtcggccgcctcggataccagcatgcggaaaatgtcgcgtaccggatagcgaatgcagaactgactgcagtatgtgatattgatatcaaacgcgccgaagaggcggctggtaagctgggagcagaggaattttacagtgattacagggagatgctggaaaaagcagacattgatgcggtgcttatcacaaacacctccagtgagcactgcgcctgtattaaagcggcatgtgcggctaaaaagcatatctattgtgagaagcctacgggacttactatcgatgaactggacgagattgacaaagcagttgcatccaatgaaggaatgacagtgcaagttggttttatgcgcaggtttgaccgctcttaccaggatgcgaagcgaagagtggacaatggggaaatcggaaggatcattaaaataagaagcatcacaagagacccggcctgtcagcgggaagactatgtacgcttcggcccgggtgccggcggcatgttttttgatatgagcgtacatgactttgatctggtccgctggtttgcccaaggtgaggttgagtcggtgtatgcaatcggtggtatctatgagtttacagagtttgaagcttttaatgacattgacaattgttcggttctcatgaaatttgacaatggagttatggcagaggtggaaggctccaaacagggagtgtgcggatatgatgtctggatggagatcgtagggacaaaaggaacgctgttcatcaatccgggtacaacatcgtttgtaactcgtaaggatgaatacggtatgagaaatgagtgtcagccatggttcagagaacgctttgaagaagcatatatgcgggaagtcgctgcatttgtagacaaggctttggcccgggaggcatcgggtgtggatacaggcgacgctagaaaggcagtcgagatggcttttatggcacaaaaatcttatgatgacaaacagatagtttatgccccataacagggcggaaaggatgaatgtatgaagaaaaaaatattgacagtcattttagtgttggttatggtatcaggtctggcggcatgtggaaataaggagaagaaagaggattccgacggcacaggaacttcttctggtaaatctcagaaaattgcatattgcatcaacagttctacagatacatttgaagtgtacgtatatgaaggtgcgaaaaagtactgtgaggaaaagggcatagaactcgtccttgtagacggcgaagatgatacggcaacacagctcagtaagatggactctatctgtgagagcggcgttgacggtgtggtacttgtaccggttgatacgaacggtgacggctcagagtaccgtaagatagcagatgaatacgatgtgccgctcgtctcggcagtacgccagtgccagtcggcatgggtcatggtatccacggattcctcagaggccggaaagatgcagggggagtacatagtagagaattatggtgaaaaactggatgttgcactgctcgtggggattcttggttctgaggatatgacgaagagaacagaatcatttaaagaggtattgtccaaatatcctgacgtcaatattgtgtttgaggactgcgcaaattggaacagagacgaaggaatggcaatcgctgaaaactggatacagagtaagaagaatatcgacgtggttgtcgcaaataacgacgagatggcaatcggtgcaggacttgcacttgaagcttccgatatgctgggggacgttgcggtcatcggcattgacgcacaggaaaatggtcttgcggccatggaggacgggatactgacagcctctatattccagccagcaggagagcagggaaagacagcagtggagacggtgcttgactgtatcaacggaaaatatacaggagaaaagacagaatgggtacagattaattttgaaatggtaacgcaggataactataaagactatatacagcaataaagttgtacaaggtataacggcaggcgggcacattcataaacttgaacaaagggagcgtggagatgtccgcctgctgtcaaagctgctgtcaatagcttttgtttagagaaatcggtggatgatatatgaaaaatagcgaatatattcttgaaatgaatggaattacgaaagagtttccgggtgtccgtgcattggacaatgtatctctgaaggtaaaggaaggcgaggtgcatgccctgctcggagaaaacggcgcgggaaaatcgacactgatgaaagtgcttatgtcaatttaccctccggattcaggtgaagtatatttcatgaatcaaaaaaggaacggacatctttcagtcaggaaagtactggaggacggcatctccatgattcatcaggagttggctgcagtacctgatatgacgatagccgataacgtacatatgaaccgcatgccgaataaagggatttttgtagacgagaaaaaaatgaatcgggatacgctggagcttttccagtctatagggctggaaattaaccctgaatggaagataaaggaattgactaccagttatgttcagatggtagagatagcacgcgccgtttctgctggagccaaactgatcataatggacgagcccacatctgcgataacggagcaggaagtagaaatgctgtttcgggtgattcgtaaattgagaaatgagaagaaatctatcatctacataacacataagatggatgaaatctttcagatagccgatactgttactgttctcagagacggacagagcgttgcgagtaacattcccatatcaggactggattaccagtctttgataaacatgatggtggggagggagatcactcagatgtttccggaaaactcggctgttcccggcgaaattgcaatgaaagttgagcatttgagcaaagccggggaattccatgacatttcttttgaagtgcacaaaggagagatactggggatcgcaggtatgatgggggccgggaggtccgaactgatgtcggcagtgttcgggataacgaggcctgattcgggtgaagtatttgtccatggtgaaaaaatgagacagggagacccgcgcgagtcgataagcaggggaatggccatgctcacggaagacagaaaaggtactggccttttcctgggaatgagtattacggacaatattgtaatgccaagtcttaagcaggtgaaaaaggccctctttctttccagaaagaaaatggagaagatcgcagataaacaagtgaaagatttactcattaaaacggcagggctgggcgttcagtccaagaatctttccgggggaaaccagcagaaagtattattgggcagatggctgtgccggcagccagagattttgatagtagacgaacctacaagaggaatcgatgtaggcgccaagtatgagattcacaaaattctttgtgatttggcgaaaagtgggaaagctgtcatcatgatctcgtcagaaatgccggaggttgtcggtattagctccagagttcttgtgatagccgacggcaggatcaccggagagttatgcggagaagagatcgggcaggaaaatatcatgaaatatgctgcaaagttggaaaaagagccgaaaggaatggttgaagatgaagaaattatctaaaggaataacgggacatatcggaaaatttggtacactactagtcctcttgctcataatcgttgtacttggcattgcagaaccgaatttcctgtcccttaaaaattttacaaatatcatgcggcaggtatctgttacaggaattatctcttttggcatgacaatggtaattatcaccggcggaattgatttatcgccaggttctacattggcatttgcaggcatggtcatcgccatatttgcaagtgcaggaaataatataggagccgcgctttctggaatcggaatcgctctgctctgcggcgttgtcaacggtggagttatcgcagtgacggggattcctccgtttattatgactctcggcatgcagctgatggcgaggggggcggctaatattgtaaccggcggtttcccaatcacaaatctgaatggcagtttcagacagatcggaggcggcagcgttggagttattcctgttccgatcattatatacgcggtactggcagttttaagtcatctgatactggcaaagaccgcattcgggaagtctgtctacgcgatcggtggaaataaagaagcggcacatctatgtggtattaatgtaaaactggtgactttccttgtatatgcctatatgggtattatgacaggtgttgcagccattatactgacctcacgtgtcaatgcaggaaacgcttccgtaggtgtaaattatgaatttgacgctatcattgcaactgtgatcggaggcacgagcctggcaggcggagtcggaactatatttggatgtattatcggtgcccttgttgtcgggtgtattgacagtggcctgactatgttaggtgtgtccgcattttaccagcagatttttaaaggtgcgctcatcattgtttctgtaattctcgatacgtatcgcagcaaagcggtcaagatacgaaaatagccggatatcaagcaggaggactgcaagtatgaaaggattattttttgccggagaaggcaagtttgaagtgaaagaggttgagaagcctgaaattaaaccggaggacgttctgataagagtcgagactgctgccatatgcggcacggatttacatatcttaagcgtaccaccaggacatccggcagcagagggagccatactgggacacgaattcagtggcattatagaagcggcaggtgataacgttgcggatgtccgaattggtgaacgggttgtggtggatccttcgttgtactgtggaaaatgttattactgcaggcatggacagccaaacatgtgtatgcataatacgtgtctaggggtgtttctggacggcggctttgctcagtactgcgttgcgcctcagagctgtctttataaggtgtcaccagatactccggctgagaccgcagtgcatcttgatccggttgggtgtgtgctgacctcaattgataagctgcagccgatgcttggggagactgcacttatactcggtgcaggacccatcgggttatattttattatgatgctgaagcagatggggatgagaaagattatagtgagtgagaaatcctctctccggaagcagtatgcatgcaaattcggagcagatatcgtagtagatccggccagagattcactggaagatgctgtcagaaacaatacagtggacggtgccgacttttcggttgatacagtgggaacattgatcaatgaagccatagtacacacaagaaagggaggaaagatactgctgttcggcatgaattcgagtgtacagcagacaatattccagaacacgataacgaggaaggatctgaccattataggcaattatgcatcccgatataaatttgatgatacgctcaggatactggagagcggtctgctgccggtgaacgatatgataacacacagaatttctctggaggaatttcaaagtggtatcgacgcgctgaggagcggtaaagcaataaaagtactggtagacccgtggaaataatgcctgtgaggtgaagaatatgcagaaagtgcgactaggtatagtcggccttgggcggatgggcacatatcatgcggaggatatcgcgttcagaatgaaagatgccgatttaactgctgtctgttgccgaaatgaagacagggcacgaaagatgcaggaggaatttgggacgagatatgcattcagcagttatgagcagttacttaaatgcaaagaggtagatgcggtagtgatctgctccgcctcagataagcattgtgctcaggtgataaaagcacttgaggccggccggcatgtgttctgcgagaagccgcttggtcttacggtaaaggaatgcatggctgttgaaaaagctgcgagggctcacggagggctggttgtccagaccggattcatgacccgttatgacaaggcttacgtgcaggcgcgcaagatgatcgcggacggtaaaatcgggaaaccgatctattttcggtcctatcggatggatgccgtgagatatattcagagcagtattgcgtttgcagacaggagcggcgggctgttctttgacgtggcagttcatgattttgatcttgccatatggatacttgatgatgagccggtatccgtatatgcacttggcggctgctacagatatgaggagtttgcccggacatcagattgtgacaatggaattgtcacattggtatttaagagcggagcaatgggaactgtcttttccggcaggacgtgtccgcatgggtttcatgtggagacggagatcatagggacacatgggacgatacatattggtccgagaaatggacagacagaagtttattattatagtgagagcggcgtgaaccaaaaatttgagggatggttcagcgacaggttccgggatgcttttttggatgaaaaaaaggcatttgttcagtgcatattaaacggaacagattcggaggttacagtgcgggacgcggctgcagcaacaaaaatatctgaagctgcatgggagtcttacagacggaaaaggcctcagaagataccggatgatgagaaaaaagaggataccgacatatgattgggggaatttaaaatgaaggcattgcaggcaaatgcagaatggaaaccaagaaaaggctatcagccgacagagagagaaatcagagataaaagggcaggtatgggaaataatctcttctgtcatccttctcttaagctcgtggatatacctgtgccggtaccgaaggatgacgaggtgctgctgaaggttggaggagcggcggtatgtggttctgatacgatgtttttaggggccgatgaagaggattatttatattattgcggtcactgcagacttccggtggtcattggacatgaattttccggtgaggttgtgcaggttggaaaaaatgtcaagacatttcggacaggtgatctggcagtggctgagacaatgaacggatgcggggaatgtgcggcatgcagggcgggactggtaaatcagtgcgagaatcttgaggagattggctttacgctgaacgggggctatgcagagtatctcgtggcaaaagaaaaattctgctttcatgtagatgaccttgtcccggtgtatggcagcaaaaaaagggcacttgaagtggctgccatggttgagccgactgcggtagcctataacgggatgttcgtccgcggcggcgggttcctgcctggaggcaatgtagccatattcggtgcgggaccgatcggactgtctgcgacttcactggcaaaggcagcaggagcggcaaagattattacatttgaaaaagagcctgtacgtatgaaacttgccagggatgtgggggctgatcatgtttttgatccggatgagctatttgccgcaggaacaagcccgagtgaaaaagtgctggaactgacagggggtattggagttgaaatggcagtggaggcaacgcaccatcaggcagagacgattcctgagattgaacagatggtatcagtcgggggaacgatcgcgcagattgggatatcgccggtccggactccgatcatgtctacataccttcagaaaaagggaattaattatcactgctctataggaagttccggacatgatatttggcctcatgtgatccgtctgatcgccagcggacgcatagacccggggaagtttctgtcaaaatgcttccggcttgaaaatgccattgaggccattgaggcggctgaaagactggaaggcgggaagtttgtcattacaccaaactggtaaggaaatttgaagaaagagaggatacattatgttgaatgttaaatttggggcactggattttgcgcttccggggcagttggtaggaaatatcagactggcacatgagattgggcttgacggacttgagcttggctttctgaggtatcaggaaagaggatttatgctcgggcagaagtggtttcgggattattatctggaagaaggagaaaagtataatattgcatttccatctatggcagtgtgtgaatttgattattgcggtctgaaacacaaggtgacgactgagaagggcaggcgtgtaagagaaattatagatttggccatagacacggcaacatatatgaagatggaaatggtcatgatgcctagtttccgcgacggatacatagagacagaggaagacatgaatgtaactgctgaggcgctcacttatgcatgtaaggaggcggcaaaacatgatatcacgatagctacagagaatctgctgacgattgaaaagaatctggaattattccaaaaagtagggcagcctaatttttcctgtctgtatgattcacagaattaccgtgtatggaaaaactggtctcagccagagatgcttaagcagctggccgataacaatattctctatccggaaatacacgtaaaggacgggattgagcagagcggcagttctgcttatctgggagaaggagacactgatttcaggggaacaatgaaagtcctgcatgatataaattattccggatggctccatttagagaacttctacgacaggatgccgttatgtgcctcagaggaaacatatatcgatgtgacaaaaagggatctggctatattgaaagaggcgtgtaaataatcattgtgtgaaagtgaggacataatatgcatttaacattgatgacggacagcctcggaaagctgtcctttgaagaaatgctggatacggccgcaatgctcggaatcgaaacactggagattcccacaggaggatattccaatgcgccgcacatggacattgacagactgctggagagcagacaggccagagaagattatatgagagcgatcgaaagcaggggattgagactcgaggtattgaactgcaacggcaaccagctgtccccggatccgcagggagagaaggatgccaggctcgttgagaagacattccgtctcgcgcagctgcttggcgtggagaaaatagccatgatgtcaggcctgccgggcggcggtcccggagcgaagtatgccaactgggtcacctgctgctggccgcctgttatgctggagatgctggagtatcagtggaatgaggcagggataccgtattgggagaatacagtgaaactggcagagcagtgcggcataaaaaagatcgcgctggaagtgcatccgacacagatcgtctataatgtgcccacattgttgaagctgaggcaggctgtcggtccgatgatcggcgccaacctggatccgagtcatctttttttcatgggcatggatccggtcgaggcagcgaaagcgctcggaagggagcgggcagtctaccatgtacacgccaaagacacccatatcgagagggacgtagctgatttgaacgggaatcatgagacagcggcttatttgagcacaccggcatatgagcgctcctggacatactgcgcgctcggatatggacatgatgtgttctggtggaaacgttatctcatgacactgctggaatttggctatgacggacccctcagtctggagatagaagacgtagtaatgccaagtgtggtcgccacggccaaatcagcagatttgttaaaagaggcgatgccccgtgattatacgagagactttccggcgcatctgctggaaattaaagggcttgggtttgatatctgacggcttgcagattgtacaaagagttatgatataaaattcccggccggtaaagtatgtaagctttatcggccgggaatttttatattattatataatatggattgactttcttatatttttgtataataatttatatagaaatatattttgtgctgatgttactgctagttagaagggagaggttgtctatggatatagagagtctgatcaggcggaaaaaagagcttggaatcacgaatcagcagctggcgcagatctccggcatatcgcttggaactgtcaataaaatattcagcggtgcaacgagatcaccgcagaatgacacgatgaacgcgcttgtgtcagcgcttggcctggatttttatcagtatcgtccaggttcccgggcggacgtaatatgcgagccgtcctctgcttaccaaatggacaggaactccggcatatatacgctggatgattacgacagcctgccggttgaagttcgtgccgagctgatcgatggttatcttgtttttatagaagcgccttctgtgagacatcaggagatcatcggagagctttattattgcatccgccatcatatcaagaaagcaaaaggaagctgcaaagttattttatccccggtagatgtgcagcttgacaacgacgacaggacggtcgtccagccggatctgctcattgtttgtgaccgtggaaagagtgacggacacaggatccacggggcgccggattatgtggcagaagtagtttccgcgggcagccggaagcgggattaccttgtgaagctgaacaaatactggacggccggggtgagagaatactggatcatagatccggatggcaggaaggttacggtatacgagttcggggagcaggaagagaattttcagatgcagacgtatacctttcaggataagataccggtaagtacatgcaccggtctggtcattgatttttcagagctggatctttaacggccgggattaggacaacaaagagatgcctgtcggaagagaaagtcttcttcgcgttgagcgaagaaggcttttttctgttttgggaacaggaaagcgatatgaaaacaagaatattgttattttatatagcaataaatttatagaagtgagaggacaagattgttaatataatagtaagttaatcgtgtgtgataaattgttggaacagaagtttataagaatattgttataatatgtgcaaattctgttataacagttcgcaaaggaaaggagaaagaaaatgagcaaagctttacaggatttcagacagcttagaaaaaagacagaagaactgcgctataaccttactgccatgatggcgtatgcaggctccggccatcccggaggctcattgtcggtgctggagattttgactacgctgtattacggaggcgtgatgagatacgacgaggaagatcccggcgcgaagtggagagaccggtttgtaatgtcgaagggacatgccagccctgcgctgtatgtgatactggcggatctgggatattttccgggggaaaagctaaaagaatttgacgccgacgacagcatgctgccaaaacactgtaacaggcttaagactccggggatcgaggcatccacgggagcgctcgggcagggcttttccatggcgcttggcatggcgctcgccggacatatggataagaaagagcacagagtattctgtgtgctcggcgacggagaatgtcagtcgggcgaagtgtgggaggctgccatggcggccgcaaagtacgggcttgatcattttaaggtggtcatagacaataacaggctgcagatcgacggatttactgatgatatcatgccgctcggcgatctgaaagcgaagtgggaagcatttggctggcacgctgaagtctgcggcggacatgacctgcaggcgctgagaaagtcctttgacaacatggacagggtaaaaggccgccctcaggtactcattgccgatacggtaaagggaaagggcgtttcatttatggagaatgaggcggactggcacagcaggaagatgacgaaggcggaaggcgcgtccgcattgagagagataagcagggcgtatgaggaattcggaggcagcattgatgattttatcctgtttttgactccggaagaactgaagaaactgaaagacgcataggaggtgaataatatgaacgaagcggtacaaaaagaacgttccctgatcagtaaagaaatcttcgggaaggtgatcaccgcgcttggaaaagagaaggagaatatcgtagtctgtgacacagacctgatgagatgtttcggcacaaaagcattttcagaacaatttccgtcccggcatatcaattttggcatcgcggagcagaactgcatggcagcggcggcgggcctcgccctttccggtaaaaatgtatttgccagctcatttgccaattttgcttctaaaagggcctgtgaccaggtgagcatagcggtcgcctacaacagggccaatgtgaaggtgtgcggcttatatgcaggcctgacggcagaaaagaacggggggacccatatcggtgtagaggatgtggctctgatgaggagtattcccgatctgtgcgtcatagaaccggcagatacgtatgaactggaagcggtcacaaggttcctggccgcgtatgaaggaccggtatatttccgtcagccgaagatgtacataagaagcgtatatgaggaagtgccggattttgaacttggaaaaggggtgacgctgcgcggcggaagtgacgcggccgtcatcgcatgcggcatcacggcaggcatcgccgtggatgcggcacaactgcttcaaaaggaagggatcgatgtgcgcgtcataaacatgccgaccatcaagccgctcgatgaggagatcatccgggaagctgctgttcagacgggacgcatcgtaacgtgcgaaaaccacagtgtgatcggcggactcggaagcgcggcagcggaggtgctcgcgggcatgaaagaaaaggcggtacttcacagaataggcatccgggatacatttggcgtgacggcatcgctcgattatcagctgaagaagaacggtcttaccgcggaaaatatagcagctgagataaaaggaatgctggcggactgacgacggtctgctgcaaatataaaggagggaaacatatgaaatctttagatgcatttatgtacggaccaaaggacctgagacttgaggagatcactgtgccggaactgaagtccacacagattctcgtaaaggtccacgcttcaggaatatgcggttctgacgtggagtgctatctcggccattccaaagagggcagatatgatctgggggcttacacgccgggacatgagtggtgcggcgaagtgacggctgtcggttcggaagtcatctcgctcaaagtaggcgaccgtgtgaccggagagtgcgctaattcctgcaaccgctgtgatatctgcaaggaggggatcaacaactcctactgcacgaactggaatgaggtcggcttcatgccttccgcgccgggaggcatgggagaataccttgtaggtgaagagcagttctgttataagattccggacaatatgacctatgtggaaggcgcgcttgtggaaccgtgttctgtggcctactacagtatatacggaagagacggttatgtggcgcgcacagatgactgtgtgatcttcggagcgggcgccatcggtctttttgcagccacgatctgtaaggcggccggggcgaaagtcatcgtggtggagcccattgaattccgccgtaaaatggcagaggaagtggtcggagcggacgtgaccatcaatccgtttgaagaagatgtggaaaagaaagtgctcgagcacacggacgggaaaggggccagctttgtcgtggaatgtaccggaagcgatgcgggcgtgagcgccacagtggacgtggcaaggccccacgcgaggatccgctttatcggacactccatcggacgcaagatcccgatcgaaatcggaaaggctatctggaaggggctgaacctccagggaagcgccggacagccgtggttctttacgaagacgatcaaatttatggggcgggtaaaggaggagattgactttacaaagttcatcacagcatattatccgctggaggagatccaggatgcgtttgaccgtgcgatcgagcataaggatgaggcggtcaaggtcatgatcctggcaaacgaggagaaagaaaaactggaagaactcagaaaaggcacaagataaacagaaggaggaagagttatggcagactatggcagcagcatttggctgacaacggaacacccggcgatctcatttgaaaatacgaaggtcggacagttaaagaagaaaatatgggatatgaatgaagaggaagtagacgagctgttgaaaaaacgttatgagatccccgctccgtcggagatcggcgttgcagatacatacatccagacgacgccaagatggaaggtcgtggagaagagaaagaaaaatgatgtggtgctcgtgccggtagggtgtacggaatgccacggcatgcataccgtatctgcactggatacattccagtgccagtctatcgtggagggagtccgccgcgcgacagccaaagacggccgtgaagtgagcctggcgtacaatccgcttccgtacggggcgcatccgtaccatcatcttggcatgcccggcacagtgatggtgccgcagagggtggcggttgaagtgctcgtggcgactatgctcggcctgtggaacgatggattccgcaaacagatatatatcaacaatcacggacagctctgggtgcttgagacggcgcttcatgagttcttataccgctatcagcttccttgtatcattcaggtgatggactggcaccgggcgatccgcgaatttttctatcccggggcaaaagaggatatggtaaagacaccgtttgtccatgcggacgaatgtgagacatctgtcgggatgctctgcttcccggaggggatggtagacttaagccatgtcgacgagacacatccgaagagctactttgagccgggaaggtttgacaattctacagacagcttccaccgtcctcagaggtggagtgagacagagatgacttcaccgatcacatataaggggacgccggagggcgtagtgggaagcccggcgatcgcggaggcgagaaaggcaaaacggccgatactggcagcttgtgaatatctcaccttctgtgtagatgagatcctggatgcgttcccgccggggacagtaccgccgacggaagaggtgacccaccgcacggacgaagagatggaagcatatctgaaagagccgggttccgaaggatggcgctctgtatacggtcttccaagagtcggaatggaataaggacacagcacaggagagggtgaaggaaatgaagacgaaaggcgcactggaagggatccggatacttgatctgagccgtgttctggcgggaccgttctgtacgatgatgctggcggatctaggcgcggaggtcatcaagatcgagatcccgggaaaaggagacgacagccgcagctttggtccctttgtgaacggagagagcggatactatatgaatgtgaaccgcaacaaagcgggggtcactctgaatctgaaaaagccggaaggcagagaactgtttttgaaaatggttgaaaaggcagacattgtcgttgaaaactaccgtccgggcgtgatggaaaagcttgggctcggatacgatgtgctgaaagagacaaacccgaagatcatatatggcgcggtatctggtttcggccattacgggccgtacacgcagcgcccaggctatgatgtgatcggacaggccagctgcggccttatgagtgtgaccgggtggccggacggaggtcccacgagagtagggaccgccatggccgacagtctggcggggtattcactggccatcggtattctggcggccctgcagtaccgcagcagcaccggcgtcggacagaaagtagacatcggcatgatggatgccggcatcgcaagcatgcagatcatctatccgatctatacgatgggaggcaggcttccggagcggataggaaaccgctatgaatccaattatcccaccgatacatttgagacaaaagacggcatgatggtaatcggagctgccaatgacaagctgtggaccaaactgtgtgaagtgatgggaaagccggagctggccgcagacgaacggtatgacagcaatccgaagcgggtggagcattatatggagatccgtcctgtgatccaggagtggacaagaaattatacgacaaaggacgccgtggagctgcttcttgaacatggagttcccgcatcaccgatcaacgatctggcacaggtgacagaggatccgcatgcccgggcccgggaaatgtttgtgcacgttaagcatccggtggcaggggacacggtcctgaacggctcgcagtttaagatgacagagacggacccgctcatagagcgtccggcccctctgctagggcagcacaatgaagaggtctatggggaactgctcggactgtctgccggccagatcgcgcagctggaagagcaggggatcatgtaaaggagagttttatgagactgccggaaaaagtaacgataattgaagtgggtccaagagacggctttcagaatgtaaaagactttatcgcaacagaggataagaagaggatcatagacagcctcgtgagcgcggggatccaaaatatggagatcacatcctttgtgcatccgaaagccatcccacagatggcggatgccatggagcttgcaatgtccgtaacgtactcggatgaaaggctgcgcaagatcgcccttgtgccgaacgcaagaggggcgcaaagcgccgtggcatgtaaggtgggggaagtcagttatgtcatctctgcgagcgaggctcacaataaagcaaatgttaacagaacaatagaggaatccgaagcggagcttaaaaagatcagggagacagaaccggcgttaaaggtgcggctggatattgcgactgcgtttggctgtccgtatgccgggaaggtaggaaaagagcagatatacagactgatcagcaccggcatacaggaaggaatcgaagagatcgtgctctgcgatacgatcggtatcgccgatccaagacagacagccgtgctggccgcggatgtcaggcagagatatccggatacccggtttacgttccatctccacaatacgagggggctgggactggcaaatatcctggcagcgatgcaggagggcattgattcctttgagacttctgtcggaggactcgggggctgccccttcgcgcctggggcggcggggaatgtggctacggaagacttggtaaacatgctggatcatatggaagtatcccacggaatatgccaggaaaagctgcttgaggcagccgcatatgtcagacagactgttcatgcagaactgacgggaaacatgctggatgcctgcaagtatgaaaatatctgatatacgtccgtgagcaaaggccccgcggcagcagccaaagccaggtttggctctggtctgccgcctgcgggaatataacatggatcatagagagaaagaaggaagaaatcatgtcagaaaacaggaacgagcaggaatacgtaaaagaactggtcgcgcgggcaagaaaagcccaggccgtggcggacacctatacgcaggaacaggttgaccgtctcacgagggcggtcgggtgggcgcttgtccaggaagaaacagtggaaaagatcgcaaagttctgtcttgaggagacgcggatgggaacctatgaggcgaagcttggcaagctttataaaaaggtccggggtgtgatgagtgatatcaatccgcagaagtctgtcggcgttgtagaagaagataaggagcttggcatccgaaggatcgccaaaccggtcggcgtcatcggctcgctcataccgacgacacagccggaattatgtccggccacacaggggatactggcggtgaaaagccgcaacgccattattttttcaccgcatccgaggagccagaagacaacctgtctcgtggcggaggtgatacgcagtgtcctgaagcggtacggggcgccggaagacctggtcatctgtgcggagcatccgacgatggagatgagcagggagatcatggcgcagacggaccttgtcattgccacaggcggtgcagggatggtgaaggctgcctacagctccggcactcctgcttacggcgtgggcgttggaaatgcggtggttgtcattgatgagacggctgacttaaaggaggccgcccacaacgtacatgtcagcaaggtgtttgattacgcgtccggctgttcctgtgagaattccatcgtagtacaggaaggcatttacgatgaatttatcggctgcctgaaagcagaaggcgcctatcttgtgaccggggaggaaaagccaaagcttcagaaggcgctctggccccagttcccggagaatcacgtgctgaaccgggatattgtgacacagccggcaaaaaggatcgccgagatcgcacatatcgatgcggtgccggacgactgtgagttcctgctcgtggaggagacgggcagaggcgaagactatccgttctcgggagagaaactgagcgtcgtgctggcggtatataaatacagagaattcgacgaggctgtgcagatagtaaatgaaatacatgcatatcagggcgccgggcattcctgcggcattcagtccaatgacgaggagcatatcctcacactggccctgaacacgaagacgacgagagtcatggtacgccagccccaaagtgtgggaaacagcggagactggaacaacggaatgccgtttacagggtcgcttggatgcggcacctggggcggaaatatcgtatctgaaaatatcacgctgaagcatttcttaaataatacgtggctttccgtgccgatcaaaggtacggtcccggacgatgaagaactgttcggagacgcgatgagagaaagtgcgcaggaataagaaaaacagtttcaaaggaggttctggaaggatggaaggcagaaaaagcttaaggtgttcaattgtcagagggggaacgagcaaagggatctttatcagggaaaatgaactgcctccggatccggaacaaagggatgaggttatcagggctgtgtttggcagccctgatataagacagatagacggactgggaggggcggatgtgctgacgagcaagctggcagtcatcgggccgccgtcccgggacgacgcagatgtggattatacatttgcacaggtaagttttgagacagataaagtagattacagcggaaactgtggcaatatctcttccgcagtaggtccgtttgccattgatgagggcatggtcagggcagacggccacgtgacggccgtgcgtatccatatgaagaataccggtaagatactgaccgcctatgtaccgacagagggcggaaaagccagatcggccggtgatttcaggatcgacggcgtgcccggtaccggagcgaagatcaggctggactggtcggatgcggcaggagggcttaccggaaagctgctgcctaccggaaatgcgcgggatgtgatcagcgcggatgggaagtcctatgaggccacactcatagatgccggtaatccggtcgtgtttgtcaaggcagacgccctgggaatgaaagggacggagtgtccatatgaaatagaacataacgcatcattgatgcgaacgatagaaaagataagaggacaggcggcagtgatgttcggcctctgcggcagcccggaagaagcggctgcaaagagtccgtataacccgtttttcgccattgtgtcggagcctcaggattatgcgggtccgggcggcgtcaaggtgggaagggacgagatcgatctgacgtcgagactattatttatgcttaagatgcacaaggcgtatccgataaccggtacggtcgccacaggcgccgcccttcgcataccgggcagtgtcgtttgggacgtgctgagggaagaggcaaagacaagaacggaagtatatataggccatccgtccggcaggataccggttgagtcagaagtcacggccgacggcggcagaatagaactgaagaaagcgtgcgtatacagaacggcaagaaggatcatggacggcatcgtatacctgccggaaagatagagtggggatgcccctgccggcggaggaggcatatgggtaagacaatagcagaaaaaataatcgccagagcggcaaaggaaccggaagtaaggcccggcgatatcgtctgggcagatgtggaccgggcgatgatggacgatatactcggaccgcgcattcagatcgcggaacagttaaaagaactcgggaaaccggtatgggatccggataaggtcgtcataatctcggaccattatacaccgccggcaagtatccaccaggcggagatcgtaaaatttacgagagagtgggcggcggacaacaagattcaaaagtattatgaatttgaggggccgtgccaccaggtgatggcagagacagggaatgtaaggcccgggatgatcgtgcttggaaccgattcccacacgtgcatgggcggcgcgctgaatgcatttgcgagcggagtgggttccacggaaatgcttggtatccttgtcacaggaaagacgtggcttaaggtcccggagacggtcagagttctctgggaaggggaattatccgccaatgtgatggccaaggatatctcactgcgtacgatcggcacagtcggacatgccggggctacctatatgtctgtggagtatgacgggcagacgatcagaggactgcctgtggacgaacgcatggccatcacgaatatggcagtggagatgggggcaaaagcagggcttatgccttttgacgatatcacagaggcttatcttgacagcatcggtgtaaaggattatgaaccatatcaaagtgatgcggacgcttctttttaccggacgtatcagttccgggcggaggagttaaggcctcaggtggcatgtcctcatgaggtggaccgggtgaccgaggcggacaatgtaagagatgtaaagatacagcaggcgtatcttggttcctgtaccgggggacggctgcatgacctgaaggcggcggcagcgtatctgaagggaaagaaagtggctccaggcgtgaggcttcttgtctctcccgcgtcgagaagtatatggagagaggcgggacggcttgggtatctcgataccctggcagaggcgggaggggtcatcatggcgccgacgtgcggtgtgtgcgtgggactgcacagcggtctgatcgcggcgggcgagacgtgtatctcttccagcaaccgtaattttctcggacgcatggggagcaaggagggacagatctatctcggctcgcctcttacggtggcggccagcgcggcggcaggcagtatcagggcggcagaagaataggaggggacagggatatgacggaaggaaatgcgttaaagtatgggaacaatatcaacaccgatatcatctcgcctcctcaatatatggaactgccggtggaggaagcggccagatatgccatgagtgcggtcgacccggatttttacaggaaagtcaggaagggggatatctttgtggcgggaagcaatctcggttccggatccagcagagagacatcgccgctgacgctcaaatatctcggtgtcagcgtggtggcggccaagtcatttgcgcggatcttctaccggaatctgatcaatgtggggatccctgccatcgaatgcagggatacggataaaatacgggaaggagaccggctgagggtggatgtgaaggaagggtatatctataacctgacgagatcggaacggtacaaatgccagaagcttccggagcatctgatgaagatcatcgaagccggcggactgttccagtatttgaaagaggtgtgagacgatgaactatacgaaagagctgctggaaaaatgctgtgtaacatgcggagcggatgaaggcgtgtccccgatcccccaggaaggggagttcatccgggcaaggcagataacggatatctccggtttcagccacggtgtcggaacgtgcggcttaaagcagggggcatgcaagctgtctttaaatatcaaggagggcgtgatcgaagaagcacttgtagaagtgcttggctgtaccggaatgacgcattccgcggccatggcatcggagatcctgccgggtaagacgattctggaggcgctgaacacagatctcgtctgcgatgccatcaatgtagccatgcgcgagatctttctggcgctcgtctacggaaggacacagacgtcctactcagaaggagggctcgatgtgggggccgcgctggaggatctgggacgtgggcttaagagtcaggtgggaacggcatatgccactcaattaaaagggccccgttatctggagatgacggaaggctatgtcacgaagatggcgctggatgaaacgcgtgagatcatcggctacgagtatgtcaacatcggacagatgatggaggacatacggcagggagcgcaggcggacaaagcgctgagagatgcgacgggaacaagtggaaggtacggggaagcggcagagtatatagacccgcgaaaagagtaggtgacagtgatggttaagtttcagaatatggacaaaaagatggggcagatagaggcatttttaaagcgatatggcatggattctctcgatgaggcaggggaggtctgcctctcctgcggcatggatgtaccggccatagtgagggagatacagccgatctgttttgacgatgcgtgctgggcgtacacagccgggacggcagccgcgctctcatccgggacggcagaagccagggaggcggccctgatcatgggggaagcgctacaggcgttctgtgtcaaaggttcggtggcggatgagagacaggtgggcaccggccatggcagacttgccgcgatggtgctgtcggaggaggtcagatgctttgcttttctggcggggcatgagtcctttgcggcggcggagggagcgatcggcattgtacagtcggcggacaaggtgagaaagacgccgctgaaagtcatattaaacgggctgggcaaagacgcggccaggatgatctccagaatgaacggatttacatatgtaaagacgcggtttgactataagacggatgagctggccatcctggaggagaagtcttactccggcggcgggcgcgcccgcatacggtgctacggcgccgacgatgtgagagagggcgtagctgtgatggagcgggaaaatgtggacgtgtccatctccggcaatggcacaaatatggtgcggtttacacatcttgtggcgggggcgtacaagaagagatgtctggagcggaataagacatattttgcctgcgcatccgggggcggcatcggcagaacgctcggtccggatgagacctccgcggggccggcatcgtacggcctgacggattccatgagcaggatgtacggggatacgacatttgcaggttcctcctctgttccggcacacgtagccatgatggggtttgtcggaatggggaacaatcccatggtaggggctacagtcaggctggcagtggcagttcaggagagcagagacaaatgacaggtgttggggggatgaacgttggattacaaaatatttgagcagctcgatggtccgctctatggcaggcgggatatggaggacgggcagaattatatggaacgcataatgagggcggcctttctcggcggggctaaagagggagaggagcgcatctatgagaagatgcaggggacatttgcaggctgcgatttccgcggtaaagcgctggagatggaattttacgtacaggagtgggagctgaatccgatgctttcgatgcacggaggacttctgacgaccgcggtggatatgacctgcgggatcctcgtccgcttttataagcagtcggtgagcgcggcaacggtacatctgtctatggattttttgaagcctctgcgctgtggagaagcttttacagtcagggccaggatcaacaaacagggcaggagaattatttttctgacggcagaagtcgtactggcagacagcggacagacagcggcaacagcatccggaacttttgtgtaacattggcagagcggatgttcatatagagaaaatatgtgagagaggacaaggatatgaagcagaatatgtttaaaaacttgatgtcgcctgtgcagatcaaaacgatgcaggtgaagaacaggatcgtatttccgcccatgaacacaaatttatcttccgaggacggatgtgttacgccgcagatggaagagtattatgtcagaagggccaaaggaggagccggacttattatactcgaggcggcggggatagcgccggatacgagaaatcatccgagacagccgatgatatgcgacaggaagtatacggcatcctgggcaaggcttgtggaacggctccaccgttacggagcgaaagtctcggtagaactggtccattatgggagcgaggcgtccatacccccaagagtatctccatccgggatatcaaaatataaggatgctccgggcagaatattgagtgtggaggagatccaccgcattcaggaacagttcgtggcggcggcgctgtacgcgaaacaggcggggatggacgccattacattgcacggatgccacggctatctgatcgcagagtttttatcgcccgtattcaatcagagaaaagatgaatatgggggagattttacaaacaggtgcagatttttgcttgagatcattgacaaatgccgtaaggcgcttgggcctaagtttcccatcatggtgcgctacagcgccgatgagtttgtggagggcggaagaggcttagaagagtctgtaacgcttgccaaagtgctcgaaaagaacggcgtggacgccatcgatctgtctgcttcgcagccttccgcctatctcatgacgacgccgccttactgcctcccacaggcaaaagggatgctcgtgccatattctgagtcggtcagacaggcagtggatatcccggtgtttacggcgatcggaatacgggacccggaatacgcggagcagatcatagccgagggcagggcggatcttatcgcgctcggccgtccgcagcttgcagaccctgattattcctgtaaagtgcaaagcggcatgccggagaccatccgccactgtctctcctgcgagtattgtctcgacacgctggacgacgacagacagatctgctgtgcggtaaatccggagaccgggagggaaattgaattttccggcgtgaacgcaacgtgtcccgggcgtacgtctgagcgcaccggtctgagtggaggcgccggtgtaaaaagagtcgtcgttgtcgggggaggtccggcgggactggaggcggcccgcgccgctgcgcttaaagggcatgaggtgatcttgtttgagaagcggccgcagcttggcgggacgctgaacgcggccaaagtgccccctcataaggagatgatcggaagacttatagactggtactgcagggaacttgccgaactgggcgtggaggtgcatcttggcacggaagcggcagaagagatggttgacggtttgaagcccgatgtattgttccttgcctgcggttctcattacataaagcggatcaaggggagcgacctcacaaatgtcatcagcgcctatgacgcgctgactgatccggacagtgtaggagagaacgtcgtcattgtaggcggcggagcttcgggggccgaggcagcggaatatttctccggccagctggtggaggtagtctgtcatggagccgaagcgcttggaggaaagctgaagtttgaggcgagagagcggcccggggcggcgccggggcataagatcacagtcgtggaaatgctggacagtatatgcagtgacatggatgtattctgtaaagagaccgttctttatacacttgagaaaaacggcgtaaggctctgtccttcctgcagagtggaggagatcactgacacggaggtgcgcattttcaatctgaaggtagaaaaagatgaagtgctgaaagcagatacggtcattctggcgggagggctgaagccgaacgggcaggaggcattttccgacaagtcttatccggtcgtcagaatcggggatgccgtgcaggcggggaaaattaaagatgctatctatagtgcgtatgtacaggcggatcttatatagcatctgtttgaagttacagtatcccggagggcccacaggaacgatcaagggggcttatccgggatttgaacgaggtatggatatgaaagatacgaagaaaaacacgctcaaaatcacagcggcgctgtacgttttgatgtttgtctacgctgtgtttacgacgatgacggggacacagcttcttatccttgtgagagagtttgggctggatctggcggaaggcggaatatttgcggtgatcattaacacgggctgcatcggagggatcgtgctgtccgcattcttcatcgaccggttcgacagcaggcgtctcgtgctcctgtcttattttcttctgggactgctgctcatagcgattaaactttccggctcctattacagttttcttatactgctgctctggatcggcgtcagcatgaaatttctggatgcttccctgaatgcgtccatatcaaggctgaacacggcgaacagcggtttctacatgaatctgctgcactgcagcttcgggatcggcgcgtttgcaggaccgctgttcacgacggtgctgatggagaacgggaccgcctggcgggatacatacttttaccttggtatcgtatgtatagtgacaggtctggtctactatgccgtccagaaggggtacgcgacagagccggtgacagactgcggcgggaaggaaaagagcgggggcggacatgttatctgtctccgggtgttctgccttatggggatcctgctcttttactgcggacaccagatgggcatcaacagctggatgcccgcatatatgcaggaaacgcttcatctgcctcctgcggcttccaatttaagcgtatccgcattctgggtcggccttattgtgagccgtcttgtcagcgcggtcctgacaagatacacatcggaggaacggatcctgaaagcagggcttcttgcaggaacggtgttccttgcggttggagtcatgagcagactcccggcggcaactgtgatcggagtgaccggggcagggctcttctctggggcatgcataccacttgtgctcacgatcgggtacagcgcattcccttcggcgctgggaaagatatccaccctcctctttctctgcatagcagggggagcggtcatattcccatggctcatgggtatcagcagcagaagcttcggactcttcggcgccatgatgctggacacactctgccttgcagcggcggctgcggccgcccttatactgctgccgaagacaaagatcaagtaaatcggggacagggtattttgaattggggacgggggatttttaaaaatcccccgtccccaattcaaaataccctgtccccgatttgcagatggctgaaatcacatttctttcacattctaatcacaaaatgcccgtatttttccagtaatctttaggtagttgatttatgtataacagaggttacagttacaggaggagacaatggagaatcaggcaaagaagtgttcgttacatgttcatgtaaaagaattaggccggaagtttaacagggccgggaagaaaaaatcgttctggatcacggcggtgattatcaccgtgctcatcatagcaatggtcgtcggacttatagtacgggcgaagggtaagagcagtcaggcggcggatatgaccgtccagtcagcaacagcggaaaggggcagcatcagtacgacggtggcaggcacaggaacgcttgaaaacgggacgacgacagatgttgtagtaccgaccggtatcaaggtcaaggaagttcttgtggagagcggagatacagtggaggaagggcagacgctggcaacactggacgaggcgtccattgccggggaactgctggaggtgaaagagagcaaagcgagtgtgcaggaacagatcgacagtctgtcaagtgacgcggaagattccggcacgacagaatatcttgaggcaaaggtgctgtacgggcagatggaggaacttgaggccgcgcagtcagctctcaatacgctgctggagacgaaggcggtgacggcgtcgtgcgcaggtacagtggacagtgtcaatgtctcagcggacacggagatcacgcagagttcggcgtccgaagcaggaggaaattccggaggatctgaaaatggaaatgtatcgtcagcctcagccggaacatcggcaatgtccggcacgggcagcaattctgagatcatcctgctttctgcggccgatggaatatcagcggtccagaacatttcagactgcagtcttacggtagaagcaccggagaccgggcagaagcctcagtctgatataaaagaaacggcggaatatgcgggaactatcacatggaactgcgcgacaagtgtatatcagcctgatacagtttacacagcgacgataaagctgactgcaaaaagtggatatgagttttcggctaatattatcccggaagtaaaaggggccgacgtcacgagtgaagtgcgtaaaagtgattccggagacagcatcctgcagataaaggccaggtttgccaagacagccgcagcacaaggcacggatgatacaaagaaggacagccagaacaacgcttcttcatcggcaggctccgcaggcggcgcggaaagcaagagttccgggacggccgcgggggcatcgtctggaaatgctgtgggatcagaaagcgccggtgcaggaaacggtacttcgggcgatggcagcacatccggcagcgatgccggcacttcaggcagcagtgagtacagcgcatatgagacagcagcgtttacgatagcatcgggagataatgttaccgtttctatcaatgtagatgagctggatatcctttcggtggaagaggggcagccggcctctgtcgttctggacgcgctggatggacaggaatttgaaggcacgatcacaaaggtagctctgacagcatcttcagggagcagcagtgcaaaatatccggtggaaattacggtggataaaacagaggacatgatgctcggcatgagcgcgtcggcgaccatccacatagaggaatcggaaaatgcggtactcattccggtcagcgcacttcaggaaaaagggaacagcacttttgtatatacgggaaaggatgaagatggaaatctgacggacgcggcagaagtagagaccggactgtccaatggaagtcaggtagagattgtaagcggactgagcgaaggggatacggtctattatctgaaggccggcagtaccggcacagcagaatccggcggcatgatgaacgggcaggacgggatgatgcaggatggaggaaatatgccgggcggcggacagatgcaggacggtgaaaagcctgatatgggcagcatgcctcaaggcgggccgggcaacaggtcagaacaataaggggggacagagatgatcacatttcatgaggtatctaagatatatcatattggtgagacggaagtgcgcgccctcgaccgcgccagcatgcagatagaggaaggagaattcgtcagcatagcgggtccttccggaagcggcaaatctacgatgatgaatatcataggatgtctcgatatggcggacgaggggacttatacgctggacggtcaggctattgaagaatacacggaatcggaacttgcgcgcatacgaaataaaaagatagggtttatctttcagagctttcatttaattggaaatatgacagcggcagaaaatatagaattaccgctgatctaccagaggatagcaaagactgaaagaagagagcgggtagaggaagctctgtcaaaagtacggctggaagggcgggggacacacagaccgaatgaactgtcgggaggccagcagcagagagtagctattgcaagggcgatcgctgcgcgtccgtcacttttcctggccgatgagccgacgggaaacctggattccaaaacgggagaagggattatggagctgttccatgagctgcatgaacaaggcagtacgatcgtgcttatcactcacgatgactcggtagccagacaggctgaaaggagtattcatatactggatggccgggtaaaggaggtaaaagtatgatactgcaggcagtaaaaatggcatggaaatctattacctccaacaagatgcgttcctttctgactatgcttggcattattatcggtgtcatgtcgcttgtcgtactcgtatcgcttgtgagcgggacaacagaatcagttgaagatcagatttccagcatcggaaataacatgttgacagttacggtgcaggacgacaaaggcaggccgctgaagctgtcagaggtaaccgcactgtcagaaaacgatgagatagaatcagcggcgccggttgcgcaaagcagtgtgacggcggccagtgcttactcggaagaaaatgccgctctctatgggacaacgggcgcttattatgacattcagggcctggaattgtatgcaggccggtttatcaagaatacagatatagagaaccacacgaatgtggcggttatcaatgccggccttgccagagaggtgatgggtaggatggatgtggccggagagacggtaaagcttaacgggacagagtatcagatcatcggtgtgctggccgccaaggacagtgattccagcactacagaaaactatgaggcttatatcccttacacatcgctgattcgtctgacagacgatgtatcgtctgacgtgacgacgttttgcgcatccgcggcaagtgaggagacactggacaaagcagagagtgtcctgaatgatactttgatggaacggttcggtcaggatgaggacgcttttaccgctatcaatcagtccacagtcatggaagcgatgcagaacgtcaccaacacactggcgcttcttcttggaggtatcgcagcgatctctctgctcgtgggaggcatcggtatcatgaacatcatgctcgtgtcagtcacggagcgtacgcgcgagatagggatacgtaaggcggtcggcgcgggaaaagggaccattatgcttcagttcctcgtggaggcgctcatgatcagcctgatgggatgtgctgtcgggatctttctgtcctggatcacgcttcgggtcatatcaggagtggggggagaggatatgaactattcactgcgtctgggagtggtgtggatatcaatcgcattttccatggggctcggcattatctttggcatatatccggcaaataaagctgccagaaaacagccgatcgaagcgctcagatatgtcgggtaggcctcagttggtgacagatatagagaaagtatgtttctgccggccggaagaataaaaaatgtggtatccttacaaagaggtgaggagaatgtatagatacgacagcaaaaagcaaaaaacatctcagccgatacagaggctgaaaacatacacgatacaggactttacggtttctgccgctgtgccacatacggtaacgcctcttgatgcaaatctgatgacaaatgcacagaacattgatgccagaaagcgggtaaggcccagggacgctgcttttgccccaaaaaatatcggtttcatcccgtccaaaggttccgcagccgtacatgcaggcatccagaatctgcaagggatagcgcccgcagagtcccttattctggtaagtcatggagaaccgccggaaagcgctgtcctggaaggtgaatttggtggttacagagccggagagctggcgctgctacttcaattcaacaatattctaccggcaaattacagcggtgaaatatatttagacggatgcgatacagggcagagattccagaatcagcaagggacttcctatatcgaacattttaaacaggaactgcaggccgcctatgcagcggccaacgttaatctgggtaattttacggttaaaggaaatatcggggaagcaacgacaactgcagccgggcgggaacgtattgatatatctgctgtaaacatggatcagttcaatgatagagcccgagaattgctcagaaacgacgcagggaatcactatcacggaaagtatggtgtggctgcctccggccatgtgacgggaacccacttaagatggaccgatgcaggcggaacgagaggccaggtgctcggaaaagccggaaagctggtggtttaagcacccatagtatgatcaggcggtgaaaagggacagacggcccgggaggccagtctgtcccttgtatgatacacggttataatttgatcttcatgacatccacatccagatcccagaggaacttatccagatctttgaaagagaggaacacagtcgctgtgttttccagcgggtggattccaagactcttgcatcgtccgagatctttatcgataaagaattccaccgcatggtcggtgtcgttcataagcccgaacggggagacactgccctgcttaagtccaagatactgttccagccgctcttcggaggcaaagcttaagttgcctgcgccaagggcccgtccgagtgatttcaggtcgacggtctttttctcatcacatgttacgagaaagtggcgtttacctttagcgtcgcgcagaaacaggttcttgcagagcgttcctttggcaggaagcccaagacggtccatatcctccatcgtgtgtaccggttcatgttccaccacttcatacttgatgttcagcttgttcagtgcgtcgtatacgcgttgcttttgattttccatgtctctttctcctttcttaattcggatagtgcacgacgatgcatgcagttatcattccttttcctgtatttttgtaaatgtagtcgtcaaaggcgttgtaagcggcagaatcgcccgcttccaacacatattccctgtccttgaatataagtgtcagctgtccgctgtacacagtgataaattcccgtgtgcctgccatctgcctgttgcctgccatctgcccgccttcgtcaaattcaaagtcaaagatctcaaagtcctgtccgtcccggaagctgaagaccggatagagccggtagcggccgtcatcactgacaaggggagagacttcggctttgctcgtctgggaaaaaggtgtcggcttcggtgcggtaaacgcagtcaccggtactttcaggccgagagaaagtttgtatacagtggaaatggtagggtttacctcaccccgttccagctggctcagcatgcttttgctgatggacgtgagggaagatgtctgttcaaggctcagcgccttggatctgcgaatttcttttaagttatctgcaatcagctggtttaaatcttccaaatgaatccctccctcatattccagtatatagaatttttttctattatattgcaaaccagaaaaaatgtaaagacaggttatgattaatttcataatagacagtaaaattgccctgtgttagaattaagatatattgataaagacggaataatcgtgaaggaatgatcaggtatgaaggtaagtgagagactggaaattattatagaagaagttcaggaaaaggggcaggtaaaggtggccgacctgagcggacggctcggctgctcagaggtgacgataaggaatgatatccgcaggctcgatcagcagggagttctgaaaaagacgtacggcggggcggtcaggaaagaggaagggctgtctgtgcagttcaatccgggagagttttatctcaacagcagggaaaagcatcgtatagccgtacgtgcctatgaatatataggcaacaaggaatccattattatagatgattccaccacgggctgttatcttgctaaacatataaaggaacatgaggaaaagcagatgactgtcgtgacaaattctctgtattgtgctgcggaactgtcatctgccagacatgtggagctgttcatggtgggtggatatgtgatggccaatccgccgtccgcacttgataatatcactgccggcggagttaagcagttccacgttgacaaggcttttgtcggcgtgaacgggattaatctgaatatcggcctcacttccatgggggcgccgcagatggaggtaaaacgtgagatgatccgagcggcggatgagacatacgtcatagcggacagctccaaattcggcagcggcaatctgttcacggtatgtacgatggatgatgtgagccggatcatcaccgatgacggcgtttcaaaagaaaaggttgctctcgccaggaagctgaacatagagatggatcttgtataaaagttcatttttttattttgtgtgcggtgataacagtgtaactgtgagcatggatcgtaaggatgcagtcatttactctgacataccagttttttccgctccttgtgacggaggcatcgggttgttttatactcagtttgcaccagtctataacttcatccgtgtctaaagaaagatttttcttgatccgcacggctcctaaatctgtcgtatgtaatttgtccagatttgaaagtaattcattatttgtatacattaaaaattctccttattttctctgaaaataatgcgcagcagaataaagatgattaagcgtcgtgaagcggcaggaagagcgggatcagacaactgtgtctgtccgtctctttttgccgaatcacaggcggtaacggaacatgatgccgaagccatacgcatgtttttgatctgccatatattgttaggcatttgatatcctcagtacaattctaatcgtatatagaatatcatattttgatgaagcgtgccaaggcagcctttttgtttttatatataacaaagagacaggctactgagattaatagaatactacgtcactgcaaaaaggagtgagaattgtgggtgatccaacaaagtttagtaacttgattacttattatatttttaatttgggatttgtaattttaattctttctgagttattcattttcatatacacatatcaaaagaaagaaaagaaaggatttgatacagataaaggaacaaaatggctattatatataaactctttcttctgcattttcgtaagtcttattttagtgagcaagcaagtgccctccgatattaaagatactatgtttccacccatattttcctttataggtatatatattatttatattggtattgtcattcgagtaggtgcggttctatcattaaaaagaaattttacattggatgttcaaacaaaaaactcacaacaactaataaaaacaggtctatataaatatatacgacacccagcttatacaggaagtatactaagtttattaggtatttcactagcgtttaaaaatatatatgcaactatctttgtatttattagctgtatgatatgttaccatattcggattagaatagaggaaaaggtattacttaaccattttaaagaagaatactgtaattataaacgacacactaagaaactatttccaaagatatattaaactaaaaagtcaggtggtaaaatgggaaagtattgattatatcatttgatttctgaacaaaaatatgatttcaccatagaccctttttgacctgctatattttctcttttgccataaggggttagtctttaccaaggaacagctatatgagagtatatggggctttaacaatgcgccagagggtagcgatctgacatctttcatacgaaaactaagaaagaagatagagccgttcccagatagcccgcaatacatactgaccgtctggggtgtcggctataagttcaacgaagaaaaaccgtaggttatggttaataaaccttgtgtttaagcgataattggctttcttattttaaatttaaacaaacattcaatacaacaactgaatacgcaaaaaccttcgcccgtacaaacactatgttttgcgcgggcttttttcatgtgtcggtctttttcagttatttacgcccctaatgatagaaacggtgtttctttttttgtttacaaggccacagaacaatgtaccatagggatagcaaaaaagcagcataatggcatttgcgcgcaatccttatacagtatataatttgtacctgttataatgattaagctggcttatatttaatatcatgcagtaattttaccattaaaaggcaatgtcaaagacttttgacagacaaaaaatatacattcatatacaatacaataaaggagaagatataagatggatattggattacgaattaaaaaattaagagaacaacaaaaaatttcccaagaagaactggctcttaaaatatttgtttcaagacagacagtttcaaactgggaaacaaataaaagctgtcctgatgttaaaagtttaattatactatccaatgtcttcaatgtatctttagatagttttataaaagaagatataaaggagatgagagaaatagtagaaaaagctgcaattaaaaagtttaatatgatgagcgttgtttttctggctgaattgacagccataacggtaagtgcctatcctttagctattattgatgggtataccggaattgttatttggttatgcctgtttgccgtaacactatatacagcaggcaagattgaaagttttaaaaagaagcatgatattcaaacttataaagaaattctggcattcattgatggaaagcaattaactcacgatgaagcacaacaagaaataggaaaaagaaattatcaaaaaataatacttgcacttttggcaagtataatagcgcttgttgtaggtttggtcgtaatatttgtttgtcaacatttattattattatagggaggaagtataattatgggattagaattttggattataatgatagctttaatagctatgggcggaagctgttcactggcaggtacatggtgggagagaaagaaaaaagaaaaagagaaagaagaaaagaaagaacaaaagaaagaacaaaatattactttttaatgctgatcaggcagttagtcttaggactggctgcttttttcatgcccggaaaggagaagtatttaagacaatttacaaattcttcaaataactgatgtgagcggtctgtcgtaatgactgaccgcttttatgaaaaaaggacgctggttaatatgtatgcctctgtactaagatcacaacattgtaaaaaatgcataaaattatcgattgatatttgttggttattaattgataattatattgatttcgattgaaagaaaagatataattacaacatgaaaacaattaattgtatttcaattgaaaggaaaataattatgaatcagaaatttaaacctgttatagggatcacgatcggagatccggctggcattggccctgaaatcattattaaggcattgaaagaaaaagccttgtatgagatatgccgtccgctcgtgatcggaagcgttaaagtacttgagcgggcaggaactgcgataggtgagagcgggctcagactggcggcagtagaaaggccggaagacgcgcaataccggcacggtgtcataaatgttctggaaaccgggaattatgatattacagagctggaatggggtaaagaacagaggcttgcgggacagatcgccattgatgctgttgaaaaatcgatcgagctcgcaatggcgggcaggatcgacgctgtgacgactgcgccgatcaacaaggttgctatcaaaatggtgggagtcagccaggccggacacacggaactttatcaggacggcacaaaggcgccgtatgtgcttacgatgtttgactgctttaaaatgcgggtgtttcatctgagccgtcatatatctctgagggccgcaattgattacgtgacaaaagaacatgtgctaaatgacattgagcgtatggacacggagcttaaaaagcttggattaaaccggcctcttatagcagtggctggactgaacccgcactgtggcgagggaggacttttcggggatgaggaactgaagtacatatgccccgccatagaggaagctgtagaagaagggatcaatgtggccgggccgattcctccggatacactgttttgcagggggaaaaaaggagaatttgatgcgattcttgcattgtatcacgaccagggacatatgccgtgtaaaacgctggatctggagcgttcggtctctgtcacactcggacttccgtttatcagatgttctgtggaccacggcacagccttcgatattgcaggaaaagggatcgctgcgaacacgagcatggatgcggcgatcagaacgacggtaaaatatgcggtggccaagcataacgcaaaaaagtaaggaggaatcaagatggcagttataggtgctgtaacggatgattttacaggcacggcaagcgcgggggtgctggtggccaggtcgcaggcaaagacaggtctgttttttgatgcggatgcggttaaaaattttaaagattctgaaagactggatgctgtgtatgttagcagcaacagcagacatatgccgccccgggaggcttaccgggcagtaaaagaggtgacggaagagctgaagcagatggggatccgctattattccaaaaaaatagacacaacactccgcggcggcatcggatatgaaattgacgccatgctggattgcctggggctggatacgacagcggttatggtaacggcaatgcctcagtcaaggcgggtctgcgtaggcggattttcaatcatagacggggtgatactgacagagactcctgttgcaaaagatgtgaagacaccggtgagggaatgctatgttcctgaattgataagagggcagtcaaagaatcaggtggacttcatctgcctgagggacgtcctgagcggcgtagatccgctcaagaaaaagctggcggcatcgaaagaacagaaaaacaggattatcattgtggatgccataacaatggatcatctggacattatagctaaagcgtgcgtgcagcttgggtggaatatattggcagtggatccgggggcatttacaatgaagcttgcgtatcacagaggcgtcataggggaagaaaaaccggcactgtcagacggcgcggaacctgacggaacaaagactgccctgtttatcgtaggaagcgccaatcctgccacagagaagcagatagatgtactttgcgcgcacggcagtgaatataagaaggtcagtgtctcaccgctggctctgctcgaaggcggaagtgacgcggagaaggaaacaggcagggctgtgtgtgaagtgactggtctgttagagcagcaaaatagaacgagagcggtcattgttgagacagcactgcatggaacggtggtgaacctggaggaagaggacggaaagcgcggctacaggccgggaacaagttctgcgttgatcaacaggggtctggctgaaattacaaaacgtgtactggaatatgcgggaaaggaacggatcgcgggccttttgctgaccggaggtgatacgatggaaagtgtctgccgcacgatcggcgtggaatgtatccaggcgctcgataatattgtggcacaggtcgacgtgggaaggatcatgggagcgtatgagggactgccgatagtggtaaagggcggcttctgcggatatgaggatatagggatcgatattgtagagagactgttgttagaagcatcgaagtagatgaggaggataattatgatactaaattttttgaaaaaagttccggcaggcatgatggtgattccgctgctgatgggaagtctgatcaacacattgtttccggatgcactccagatagggggacttacgaccgcacttttttcaagcgcgggcacatctacactgctgggggcgcagctgttctgtatgggaactgccctgcaggtgaaagacatgccgaaggtactgaaaaggggaggggtgctcctgctggccaagttcgccgtaggagcgctgcttggaatcataatcggaaagatatggggaatggaaggcgtctttgggcttacgacgctggctgttatcagtgcggtcacgaacagtaacggcagtgtttacctgactttgatgggaaattatggtgaccaggctgactgcggatgctttccgctgcttgcgctgaatgacgggccgttctttacacttgtggcgcttggagcctccggtcttgcaaatatccctttcatgtcactgctggcagctattataccgatcgttcttggaatgctgatcggtaacatagacaaagggatgcgggaactgtttgctccgatgggaaccgcgatcattcctctgataggctttgcgctcggtgccgggatcgatctgacgagtataatcaaagggggatttcctggaattctgcttggtcttatcaccgtatttgtcggcggcgggtttattctcgtctttgacaagttcatcagcaggcggcccggatatgccgcatgggcagtggccacaactgcgggcaatgcagtggcggttccggcggcggtagcgctcatcgacacatcgtgggagccgtacgttgcgacagctacggtccaggtcgcggcatcggtagtggtgacctgcattgtaacgccatttataacgagctggtgggctaagagatttggctgtccgaagatgccgctcccggatcagaaatttgactaaacgctctgtatttacatagttaattgcatattgtggattcataaaaaataaacagccgtgacagttttaagtcacggctgtttgaatacacgtctgtattgatatatttttttgccggcagtgaggaggaaagtatgatctttgaatactgatgtgagattattttttctgcatgatcaagcaattccgtaccatatccgttaccctggcgggagggcagaacaaataatctgcatatttcattctcccttatcgtaactgtacctacggcattgcgctttaggtcaaagcaaagaaaaacttggttctctttaatatccttgataatattagcctcattgtgatgtgcaagaaaatattccactgcgcctttaggagagtaatgcggatatatttcttgttttatattcatccttgtatccatcctgcctgttacacgttcgtctgcgttttgacatatttcaatgctttagtgaccggcggcagcgatacgatcacaagtgtgatcacagcctccgcgccgaggtaggacccctgatagagtgcggaataggcccacggattcattccttccggtgcataggatgcaaaaaagatgaccccggacagaagagaacagatgaaccgcccgatgacacccactatgtagccggcctgcaggccatatttccgttcggaaaagaaaccggacaatccgagcgccccgaaagcaagcggataatcgagcactacctgctggatcgagagcatgtacggatctacaacaaactgaagtatgccataggcaaccccggtcagaataccatacttcggcccataccagtatccgataagacagatgaacaacatggataataatgtgacagaaccgcccatgggcatctcccatactttaatgtaagaagtcaccattgcgagtgcgattccaactgcagaaaaaacgagtttctttgtgacagcacctgaagaagtgcttgttttgacacttgattttgacatattaaattctccttccttacgccggcattatccggatcaagttataagggtctgtgcgaagacatgcacatctcagccgtttcggcgccccgttcaaatactataatagtcagaaaataagaatgtgtcaagtacgggggttgtacgaaaggggtcagacccctatggccataggggtctgacccctttgaattgtttcaaagaatttatacttttttaattgcatgttgggttaatgagaagtagaatagagggagtgattgaaagaaagtgaggtttattatggaacaacagcaaaatgtaacaccgcctgtacccccggagagcggcggaaagcggttcatgcatctgtggggcccgctgctcatcaagtggggaattgcttttgccacgatgatggccggtgctatggtgtgttctttcttatatatgtctgcgcattatgacacagctatgaaagcgatggagaatcaggaccagatgatgaatctgtataatgccatactggaggaactgatgaagtggcagaccgtgatcgaaggggcggctgcattcatcacgataccggtcatgatcgtgctctttcacagagacagggtgagggaacgggtatccggaatcctgccgaacaaaaaggcgccggtatggaaatatggcgctgtgctcgtaatgtcagttgccatgtgctggggactgaacaacctgatcgctatcagtggagtgtccgctctgagcagctcttatgaggagacgatggaggtgctctacacgccgccgcttctcatacagatcatctgccttggcgttctcattccagtctgtgaggaactcgtattccgcgggcttatgtttaagcgcctgagagcgagagggggctatatgcaggctgccatatactcatccgttgtattttccatcctgcacgtgaatttagtgcagatgatctacagctttgtgcttggaatgatgctggcttatatttatgagaagtatggttcgataaaagcgcccgcagcggctcatgtcgtcatgaacattttctcggtgctggccacgaagtacgagcttctggagtggctgtcggcagatattatgaggatagggatcgtcacagttgtatgtgcggcagtggcggcgacgatgtttgtatttatccagagaatagaagagagacccgattatccgaataaaccgggggaaaatgagaatctggcagctgtgtaagctgtcagattcttaagtttatcatgtttttttttcggggcacgatcatctaaaaaatgttggaatataagctgcagagttgtatacgaactcatacgtgcgtttcaacgagatggagaaaattcctggcatttatttttctgtgctattttaaggagttgcttttacaaacggaagttgaaatcggcgtaggcactggagccatgttcgtgtacatccaggccttctgtttcttcctcgcggctgacgcgcagcccgatggttttgtcgattatggtaaagatgacaaatgccattacaaggacgtatgcggctacgctggctacacctgttatctgtgtccccagactgcagccttctccgaagacccctgtgagaatggttccgagcgcaccgcagataccgtggacactgacagcacctaccgggtcatcaatttttattttctggtcgaagatttctatagagaacactacgaccagaccggcaacaaggcctataataatcgcttcccaactgctgactacatcacagccggcagtgatcgcgaccagcccggccaaagcgccgttgaaggtcatggacacgtctggctttccataacggagccatgttacgcacatggccatcaatgttgcggcagcggcggcgagatttgttgtcatggcaatatcaccaagacttgtggatgcggctgttgtagagccgcagttgaagccgaaccagcagaaccataaaatgaatacgcccagggcagcaattggaaggttatgtccgggaatagccctggccttaccgtctttagtgtatttgccaatacggggccctagaatcttagcgccgaccagagcacagagcccgcctaccatatgtactgcagtggagcccgcaaaatcatgaaagcccatctgggacaggaatcctccgccccagatccagtgaccggaaacaggatatataataatactgatcgctgcactatatgcaagataagctgcgaactttgtcctctctgccatggagccggatacgatcgttgcagcagttgcgcaaaatacagtgtggaatatcatgaacactccgacaggaagtccatttatcattccatcggcatctgccagggacgcgggattaaaaaatcctttgatgcctataatgccattccagtctgtaccgtgcataatggcgaagccgaagataaagaagaataaacttccaagcacgaagtctagcatgttcttcattagaatgttgcctgaattcttggcccgtgtgaaacccgcctcacacattgcaaaacctgcctgcataaagtatacaagtaccgcgccgaccatggtccacattacattcaacagcaggccggatgcctgggcggtgtccatcccattttccattaatgttgataaatccataatactacctccttatgtcgatacaaaaagtatgttttatagagcgtctgaaccgcgttctcctgtgcggatacgcacggcatcttcaacctcatacatgaaaatcttgccgtcgccgtaagtaccggtccggatctcatctataattatattgatgagttcctgtgcggcatcagcctcaactacagtctcgacttttaccttgggcagcagattaacattatattctgcgccccggtatacttttttatggcctttctgattgccgtaacccatgatgttgctgatcattaagccgtttacattactctcatccagtatagctttcaagtcttccagcttctccggctggataatgatttccagttttttcatagcagttgcctccttttttataatttgtctgcccgttatttcctttagatacaactcagatgatgggacagacggatacaaaaaagagcgctttccgcaatggaaaacgccctcgttttttgatgtgtcttattatacacgggtggaaatatttgtaaatactattttaatggaaatttaatatttcatcaaaactgtccataaaaactataagattgaaaaaaatgttgtgattattttcatatattagacaaaatatccatgaaatcccgtgtttacaaacagacgaaaatattgtatagtatgaaaaaagtttaacagatcaggaggaaagggattattatatggacaaacaaatagagcagcggcagtacggattgtacaggccggagtttgaacacgacaactgtggcatcggtgcagtcgtcgatatcaaaggccgcaaaagccatgagacagtggcggacgccctgaagatcgtagaaaatttagaacatagagcaggcaaagatgccgaaggtaagacaggtgacggagttggaatcttattacagatttcccacaagtttttctccagaatctgtaaacctctcggcatctttttacgttccgagagagactatggtgtggggatgttcttcttcccacaggatgagctgaagcgaaatcaggcgaaaaatatttttgaagtgatcgtgcagaaagaagggatgaagtttcttggctggagagaagtccctgtgaaagaggaagtgctcggcacccgggcaagagcatgtatgccgtgtattatgcaggcattcatagaacggccggacagaacagaaaaaggcattgattttgaccggcgcctgtatgtagtgcgccgtgtctttgaacagagcagcgacgatacatatgtggcgtctctttccagccggacgatcgcatataaaggaatgtttctcgtaggacagctccgttctttctttacagatctgcagtgcccggattacgaatctgcgatcgcacttgtgcactcgcggttcagtacaaacacgaacccaagctgggagcgggcacatccgaacaggtttatcgtacataacggagagatcaacacgatccggggcaatgttgacaaaatgcgcgcaagggaagaaaatatggagtccgaatgcctgaaaggcgagctgcacaaagtgctgccggcggtgagcagcgcaggttcggattctgcaatgctcgataacgcggtggaatttatggttatgagcgggatggaacttcccctggctgttatgatatccattcccgaaccgtgggcaaatacgaaagatatctcccggaagaaaagagatttttatcaatattatgcgacaatgatggagccgtgggacggtcctgcctccatcctgttcagcgacggcgactgcatgggagctgtccttgaccggaacgggctgagaccgtccaggtattacattacagacgacgaccgtctgatcctgtcgtcggaagtaggcgtacttggcatagagccgtccgggatcgtgctcaaggagcggctgcatcccggcaagatgctgcttgtagataccgcggcaggaaaacttatagacgatgaggaactgaaagaactgtatgccggccgccagccttacggcgagtggctggacagtaaccttataaagctgaaagacctgaagatcccaaatgaaaaggtaccgtcatacacagacgaggagtgcaaaaagcttcagaaagctttcggatattcctatgaagaagtaaagacttctatactgaatatggccaggaacgggatagaacaaacggcggcaatgggggcagacataccgctggcagtgttgtccggcaggcatcagaatctgtttgcctattttaaacagctgttcgcacaggtcaccaatcctcctattgacgcgatccgggaggagatcgtgacatctacgacggtatatatcggaagagacgggaaccttctgaaggaaagcgcacaaaactgcagaatgctcaaggtcaataatccgattctcaccaacacagacctgctgaaaataaagaacataaaagcagacggtttcaaggcggctgagatacctattgtatactataaaaattccggtcttgaaaaagccatagactatctgttcatcgaggtggaccgggtgatccgggaaggggcgaatatactcgttctgtcagaccggggcgtggatgagtaccatgtagccatgccgtctcttttggcagtgtccggtttgcagcagcatcttgtgcggacaaaaaagcggacgtcagtggctattatagtagagacgggagaaccaagagaagtacatcattttgccgcgctgctcggatacggtgcctgtgccgtcaacccatatcttgcacatgaaacgatccggcagctcatagacactgacatgctccagaaagattattacgcggcagtagatgattacaatgaggcggtcatacacggcattgtaaagatcgcttccaagatgggcatttccaccatacagtcttaccagggcgctaaaatatttgaggcgcttggactgaaagaagactttatccgccagtattttaccgataccgtgagccggatcggggggatcggcatggaggagatagccggagactatatggcgcgtcactcggaggcttttgatccgctcgggctggaagcagaacttacgctggacagtataggacagcacaaggccaggagcggcggagaacggcatctgtataatccacgtacgatacatctgctgcagcagtccacaagaaggggagattatgagctgttcagagagtatgcaaaacttataaacaaagagcaggaagctgtcagtctgagaggccagcttgcattcaattatccggaaaaaggaattccgatagaggaagtagaaagcatagaagatattgttaagagatttaaaacaggcgccatgtcatacggttccatatcgaaagaagcgcatgagacactggctgaggccatgaatgaactgcacggaaagtcaaacagcggcgagggaggagaagagacagagcggctgtccggcagccgctgttctgccatcaaacaagtggcttccgggcggttcggagtcacatcccgctatcttgtgagcgcgcaggaaatacagataaaaatggcgcagggggcaaaaccaggggagggcggccatcttccaggcacaaaggtatatccgtggatcgcaaaaacacggcattccaccccaggtgtcagcctcatatccccgcctccccaccacgatatctattccattgaagacctggcacagcttatctacgactgtaaaaatgccaataaggacgcgcgcatatccgtcaaacttgtatctgaggccggcgttggcactgtggcggccggcgtcgccaaagcgggggcagggctgatccttatctccggatacgacggagggaccggggcggcgccggggagttcgatccacaatgcaggacttccgtgggaacttggcctggcagaaacgcaccagacgctcatacagaacgggcttcgggaacgggtgcggcttgagacagacgggaaactgatgagcggcagagatgtggcggtagcggcaatacttggcgcagaggaatttggatttgcgacggcaccgctcgtgacgctcggatgtgtcatgatgcgagtgtgcgatctggatacgtgcccggtgggagtcgccacccagaatccaaagcttcgcagacgttttacaggaaagccggaatacgttgtgaacttcatgtgctttatcgcagaaaatctgcgggaatatatggcaagacttggtgtgcggaccatcgatgagcttgtcggaagaacagatcttcttaaaacaagagaagttcccgtttccgaccgggcggcaaagcttgatctggaacagattctgtataacccatacggaaaggaaccggttccggccatatacgatccgaagaaaaagtatgactttcagctggaaaagacgctggatgaaaaggttcttgtgaaagaacttctgccggcgctggaaaaaggccataaaaaaagcatcaaagttgacgtgtcgaatacggaccgtacctttggaacgatgtttggatctgagatcacaagacgttatccggacggactgccggaagacaatttcattgtaaaatgcaggggcgccgggggacagtcattcggagcgttcataccgtccggcctgacgctggagctcaccggggacaccaacgattacttcggaaaaggtctttcaggcggcaagctttccgttatgcctccggaagacgtcaagtacagacatgacgaaaatattatcgcaggcaacgtggcgctttatggcgctaccggaggaaaggcatttatcggcggagtggcgggagagcgctttgcagtgcgcaattcaggagctactgcagtggtagaaggagtcggggaccatggatgcgagtatatgaccggaggaagagtcgcagtgctcggccggaccggaagaaacttcgcggccggcatgagcggtggtgtcgcctatgtgctcgacatggacaacgatctatacaagaaggtaaacaagcagctcgtcaatatagaacatgtgacatccaaatatgatgtggcccagctgaaacagatgatcgaagaacataccgcgtgtaccggttccgtgaccggaaaagcaattctgaaagactttacagagtatctgccgcggtttaaaaagataatcccggcagattatgagatgatgatgacggccatcctgcagatggaggagcagggaatgggaagtgaagaagccaagatcgaagcattttatgcaatcagaggcggaagataggaggcgtataaaatgggaaaagcaacaggatttatggaatatgacagacaggataaggaggccgaagcgccaaagtcccgcatcagacattacaatgaattttacacgcctttgccgcgggaggaacaggagcgccagggggccagatgcatgtcatgcggcgttccgttctgccagtcgggagaacagatcatgggcatggcaagcggatgtccgctccacaatcttatacctgagtggaacgacctcatttaccgtggaaattgggaagaagcatattaccgcctgaaaaagacgaataattttccggaatttacatcgagagtctgcccgtcactgtgtgaggcggcctgtacctgttcgctgaacggggatgcggtgacggcaaaagccaatgaatatggaattattgagaatgcatataagatggggtatgcgtccgccaggcaggtcagagtcagaaccggaaaaaagatagcggtcataggctccggaccatccggtctggcggccgctgatcttttgaacagaaggggccacagcgtcacggtatttgaacgggaagacaaagccggagggctgctccgctatggaatcccgaacatgaagctggaaaaacaggtgatcgacaggaagctgtctataatggaagaagaaggcatcgcttttgtgaccggatgcaatgtgggaaaggacagaaaggcgggcagcatcttgacggaatttgactgtgccttgctggcatgcggagcctcccgcccgagagatatcaaagtgcctggacgtgacgcaaaggggattcattttgcggtggattttctcaagtccacgacaaaggcgctttgggcaaacgagatgaaaccgaaggacgggacgtatatttcggcaaaaggaaaaagagtgcttgtcatcggcggaggcgataccggaaatgactgtgtcggaaccgttgtgcgccacaaagcggcatcggtgcttcagcttgaaatgatgccgaaagcgcctgaacaccgaacagaagagaatccgtggccggaatggccgaaggtgagcaagacggattacggacaggaggaggccgccgctgtgttcgggcaggatccgagagtctatgagactacagtgaaagaatttattaaagatgagaacggaaacgtgtgcaaagcggtactcacgaaactggagagcaggagagataagaaatccggccgtataataatggcagaagccgcaggaagtgaatatactgtagaagcggaccttgtgctgatcgccgccggttttctcgggtgcgagccgtatattgccaatgcattcggggtgaagacagatgagcgcggcaatgcagcgacgtcaaaggggggataccgcacgaatgcggaagctgtgttcgcggcgggagatatgcgcagggggcagtcccttgtcgtgtgggcgatccgggaagggcgtgaagctgcccgggaagtggataaaagtctgatgggatatacaaatcttaatattcagtgaagagaattgttacgaaagtattaaattttattgcaaaatttggcaatataaggtataatcattcctagatgtaggggtactatgtctatgttagacgaatgagggagtttaaaataagtaaaaaggatgattattatgaagagattgaaagctacgttggtgacagtagcgctgaccagttccctgatcgtaacgccggtgttcgcagaaccgtcggtagatgatctgaaggcgaacaagaaggcagcggaagaacaagtcagttcactgcagagccagctgacagatttgctgaacaagctcggccagctggaggaggatctgatcgccaaaggggaggagatcacaaaggcagaggaagacctgaaagaagcagaggcacttgagaaaaagcagtacgaggacatgaagcttcggatccagttcatgtatgaagaaggaaatacgagcgcggtagaggcgatcgtaacgtccgagaattttggagatctggtcaataaagcagaatatgtacagaatgtgcatgattatgaccgcgataaacttcaggaatatgtggatacgaagcagaagatcgcagatttgaagacaactctggaagaagagaagacgaatctcgagagtatgcagtctgagtatgaaagcaaagaagatgaattaaatacgacgatagagactaaaaagtcagagatcgcagattttgatgaccagatacaggcggcggcggaagctgcggcggccgaggctgcgagacagcaggaagcgcagcgtcaggaggcagcgtcagacaataatggcggaggcggctccggttcaggcggcggcacgaacagcggcggaggcggcagttcatccggtatcgattatacaggaacaggcaatacggctacggcgcaggcgatcgtaagcgcggcgtacagccagctcggtgtgccatatgtatggggaggcactacaccgggagcagggctggattgttccggactcacacaatactgccacagagtagccgggatcagtatcggacgtacgtcacaggtacagggaggcggcggaaaagcggtcagcagtccgcagccgggagacctggtatgttacggaacgcatattggtatttatataggaaatggacagatgatccatgcaccacacacaggggatgtagttaaggtagcaaatgtatatggttcaccatggtacagacgttactggtaaggggaaatacttagactaaggagagacttatgaggaaactgtgtagagtgtgtacgatttcattgctggcgggagttctggttgtaacaccggtgtctgcagaaccgtcggtaaacgatttggagagcagcaaggcggcagccgagaacgaggtcagcgcccttcagagcgaattgtcggcgacattagacaagatcgcgtcactggaagctgagctgaaagaaaagacagaagcggtagtaaagacgaatgaagagctggaagaggcggcctatcaggagcgccagcagtacagcgacatgaaactccgcatccggtatatgtatgaagaaggggacggcagcgctgtagagacacttttatctgcaaagagcttttccgatttggtaaataaagcggaatacgtgcagaacgtgcacagttacgataagcaaaaactcgaagaatatatcaagacaaaagaaaaagttgagacattaaaaaacagtctggacacagatgtagagaatatgcaggctaagcagacagcgctgcagaaagaaaaagagtccttaagcggcacgatctcttccaaacagtctcagatcgcacagctggacgcaagcattcaggatgcgttggcggcagcagtggaggaacagcagacggcagacggcggtgggcaggatgatgcggacgcaggtggaaacggcaatacagataaaggcagttccaataacagcggaagcaatgatgacaaaaattatgccccgccttccggcggcagcggcgcggcggttgccagttatgcctgccagttcgtgggcaacaagtatgtgtatggcggaagcagcctgacaaacggaacagattgttccggctttacaatggcggtgtacgcggcctttggagtatcccttccacataatgacagcgcacaggaggcgtacggaagagcggtcagttatgcggaggctcagccgggagatctgattttctacggtggacatgtcggcatctatatcggcggaggcagtatcgtgcatgcatccaattcggcgccttatcctgagggtgggatcaagatcagcagcgctacatacaaaccgatcaaatgtgtcagaagaattttttaaataaaagaatggacggaccggctgtgaccggtccgtttttgtattatttacctgtcgtattttacagaaagttgttgaatctcgaggcaatatatagtatcctttacgtgagtataggtaattttgaccaagtatttttattgattgaatgtaacagttcaacaagtatcatttacaggaaaggtgaaaatatgaagaatagactgacccaggctgttatagttgcatcggtggcaagtgcgctcgtagtgactccggtgttcgcagaaccgtcggtggacgatctgaagaaaaataaagcggcagccgaaagcgaagttggttccctgcaggcagaactgacagaacttgtatccaagatcagccagcttgaaagtgatttgatagaaaagggcgaagagatcacaaaggcggaagatgatttaaaagaagcccagaagcaggaagaagagcagtatgaagatatgaagctgcgcattaagtttatgtatgaggagggcgacaccagttttgtggagacgctcgtatccgcaaaaaacttttccgatctcgtcaataaagcggaatatgttcagaacgtacatacatatgacagacagatgctgacagaatatgtagagacaaagcagaaggtagcggacctcaaagttacgctcgaggaagaaatgaccagcatggagaacatgcagcagcagtttgagtctgataaggacagccttgactccacacttgagagcaagcaggcagagatcgccaatctcgacggagagatacaggcggcggttgaaaaggctgccgaggaacgaagaaaagaggaagaagcaaggcaggcagaggcaagaagacaggaggcagcgcaggctccgtctgataacggaggcggcggaggtacgggaggaagcagcaaaccgtccacgcctcagccatcttaccagggacagggcgacacagcagtcgcgcaggcgatcgtgagcgctgcgtattcgcagcttggagttccttataaatggggaggaacgacgccgggcgtcggacttgactgttccgggcttgttcagtatgcacacagggtggcgggaatttccatcccaagaaactcagaggcgcagtatgcggccggtcagaaagtttcaattccgcagccgggcgacatctgctggaagccgggacatgtaggcgtttatatcggcaacggcaagatgatcgaagcacagcagacgggtaccaatattatgataagtaatgtcagggcagtaggttatgcaagatattggtaggaaataactggcaatttatgtaaatatattgaaaaaaatagaaaaatgtagtattctgaccttaaggtatgcgggggcgtatgagaaagaacgacagaaagtttgtatttctgccgtacaataattaataaggatgggtgagaatatgaagaaacgattaggacaggcactcatcactactttagtgatgagttctttagttgcagcacctgttttggcggcgcctggcggcgtggatgagctggaaggccagaaacaggcagtcgaagcccaggcggaggatgtcaatgccaggctcgtcagtctccttgtgcagtttgatgcattgaaacaggatatggccggccagaaagaacgtatcgcccaggcggagaaagactataaggaagccagtgaaaaggagcaggaacagtatgaagcaatgaagcttcgtatacagtacatgtacgagcagggggatacgagcttccttgagactgtagtatccgccagcagttattccgatctggtcaataaggcggaatatgtgcagaaggtacactcttacgacagaaagatgctcaaagagtacgttgacacgaaaaacgaagtggcatctctgaaagaggaactggagtctggtgaagccgagatggaggcaatggcggaagacttaagcggacagcaggcgaatctggaaggtactttgtctgatatgagaagccagatagcggattttgacacacagctggcggcggcaaaggaagaagcggcccagcagcttggcgagctgacagaagatacagagaacatgaccgcatccatcgataacagcggctcagatgatggggccggcggcggaaaaccatcatccggaggaagtacaggcggcgcggccgcaggccagacgtcgaaaccggccggaaatacaggcggcagtacaggcagttcttcaaataacaatacgagtaagccctctaataacaacggcggcagtaatacgagcaagccgtccaacaataacagtggcaatacaagtaagccaagcaacgcgtcactcggccagcagatcgcctcaaaggcatgtacatatgtaggaaatccgtacgtatacggcggcacgagcctgacgaacggggccgattgttccgggttcgttcagtctgtacacagactgttcggtatctccacaccgagagattcctggggacagctggcaggaggaaaagcggtcacttactcgaatatactgcccggcgatgtcatcgtgtacagcgaccatgttgctatctacataggcggaaaccagatcgtccatgcgtctaacagcaagccgtacccggcggggggaattaagataagcagccccgcaaactacagaacggttctcggagtgagacggtactggtaataaagaaacttacagaagaaattctcactacagaaaaaatgcaggaacaagcctgtaaatgcaagaaaacccttgcatttacaggctttttgtggtaatatacaacagtcgcaaaaaaacacgcatatggttgtctgcatcggtgcctaagctcggttgagccggttttgcagaaaagaaatgtgcggaagaaagaaaaccaaatggaggaaaaagacatgagtgttatttcaatgaagcaacttttagaagcaggtgttcatttcggacatcagacaagaagatggaaccctaagatggctccgtatatctacacagagagaaacggtatctacattatcgatctgcagaagtctgtaggcaaagttgacgaggcttaccaggcaatctctgacatcgctgcagagggcggctccatcctgttcgtaggtacgaagaagcaggcacaggacgctatcaagacagaatctgaacgttgcggaatgttttatgtaaatgaaagatggcttggcggtatgctcaccaacttcaagacgatcaagagcaggatcaaccgtttaaaagagatcgagagaatgtctgaagacggaacattcgatgtgctgccgaagaaagaagttatccagttaaagaaagaatgggagaagcttgagaaaaaccttggcggcatcaaagagatgaagaaagcaccggacgcgatcttcgtagtagatccaaagaaagaaagaatctgtgtacaggaagctcacacactcggcattccgcttatcggaatcgctgatacaaactgtgatccggaagagcttgattatgtgatcccgggaaatgatgatgctatccgcgcagttaaattgatcgtttccaagatggcagacgctgttatcgaagcaaaccagggagcaaccggatacgaggaagaatatgttgaaggtgaaggcgcttacgaggagacagcagaggcaaactaatatagaaggaaggtaacttccggaacataatatagatggaggacggtaagatggcaattacagctagtatggtaaaagagttaagagaaatgacaggcgcaggcatgatggactgtaaaaaagctcttaacgagacaaatggaaatatggacgaggcagtagaatacctgagaaagaacggacaggccaaagctgagaagaaggccggacgtatcgcggcagaaggtctcgttatggctgaggtaaaggaagataagacagcagcgatcgtagaggttaactctgagactgactttgtagcaaaaaatgcggagttccagggatttgtaaaggctgtcacagagcaggcactcgcgacagacgcagctgacatggacgcgtttatggcagaggcatggatcgcagacacttccaaaactgtaaaagacgcactcacagagaaaatctctgttatcggtgagaatctgaacatcagaagatttgaaaaagtagtgacagacggatgtgttgtatcctacatccacggcggcggccgcatcggcgttctcgtggaggcttccacagatgttgtaaatgacgacatcagagcttgtctgaagaacgtagctatgcaggttgcagcaatgtctccgaagtatgtatcccgcgacgaagtttcccaggattacctggatcatgaaaaagagatcctgcttgcccaggcgaagatcgagaacccggataagccggaaaatatcatcgagaagatgatcatcggacgtctcaacaaagagatgaaagaaatctgtctgcttgaccaggtatacgtacaggacagtgaccttacagttgccaagtatgtagagaaggttgcaaaagaagcaggcgctgacatgaaagttacgaagttcgttcgttttgagaccggagaaggccttgagaagaagaacgaagactttgctgctgaagttgcggctcagatgggacagtaaactcaattttataaaaaatcttatatccccggaaaagcctggatttatgggcgttccggggatttttcatgcctgaaatacaggatcgtaacttatcataactaatcaattcatataattaaaaatagtacatagctgatgggttttctaggtgagaatcaatcgtcctgggttccagaggattctgaaatcgagcagggttctggaaagaaaaccgataacgatggagtgtatgaagcgctgcatcagcaacaagaccaactacgtgaaacagggtatgaaatcaacgatttagagctcgacaatataggaagggagaaaaataatttaataatatttccagtatttaacaaatgtattgatagctattccatttacggttataataaaattataataaataaacaaatatatttaagtaaaattgataattttgtttaaaatgactagatacttgcagcttatttctgaaataacggttaagatgttaattactttaatagtgctattaaaaataggaggagatttgtaaaatggaacaaatcatatacagatgttttaaaacacttaaaaaccattacatatttgatcgccatacgaatactattttcccggttacggagagcgagtacaaagtttttgaggattatcttcatgggaaaaacagtgataagacgcaggaagttttaaaaaaatatcaacagtttgggttattgcgtgaaaatcaagtgacaaagatagagcatccgtcttataagtgggtcggacattatgcggaacatcgacttgaggggttgacccttcaggtcactcagcaatgcaatctgagatgttcgtattgcgcctactccggattatactataatcgtgagcattcttcagagcgaatgagtgtcgaatcggcaatgtctgcgattgactttttgctggaacattccgatgaaatgaaagaacttcatataagcttttacggcggcgaaccattattggaatttgatctgattaaaaaatgtgtttcatacgtaaaggaaaaggtggaaggcaagcgtgtgacttttggcatgacgacgaacggaaccttgttaaccgaagaagttgtctcttacctggttgcacatgatttttctctggccgttagtttggatggaagcaagaaggaacatgacagcaaccggaaatttagatcaggaaaaggttcttttgatttaattatgaaaaatctgcagtatatgaaggagcattatccggattttatggcccgtaccagtattatgacggtggtcagccccaatggaaatattgctgataatctacaattcttccatacggatcaggtgttagcagacagtaatataatgatgaatccactggaggagaccggattaaaagaagaagtgcagtacaaagacagtttcaatctcattcgacgctatgaatacttaaaatatctgctatttgcaacatcgaaattagataaagagtatgtcagcgctttggtaattagcagtcattctaaaatgcagcaattttatcagaccttacatcggcaagagatatattcggggacgactcatcatggcgggccttgtataccggggatgaaacgcttatttgtaacagtcacaggcgaattattcccctgtgagaaggtttcagaaacagcaccatgtaattgtattggttctctggaaaaagggctggacattaagaaaatgaaggcgatgctgaacctggggaagttgacagaagcggaatgtatgacttgctggaatttacctaactgtaaaatttgtgttgctcagttggatgtgagtgatgggtgtgagagcctttgcaaagaagataagctaaaagtctgtcaagaagaaaagatgcgggtaatggctggtatatacgagatggcagtactgcgtgagttcaactttcacgttgaggaacgggaggcgggtatatgaaaatgatgacagtttttccgtttacaccggaagtaaaaagtatcatacgctttagagatcagatggcaggatatgagataagggcgattttatccttcaaagaacatgcagtacaactgtgcgaatatcagcgccaaacgggaattttttgtaccacagaaatagaggaggcattaaaccaatgtgattgcctgttgctgatgaataacaacacaaaacagacattagataagtatcacaaaacttatgagatggccaaaaatgatggtaaagaaatcattatgagtatggttctctggcatgagatgtttccggatcaggaaccggattcgcaggtccatctgctctcaaatgtggagcctgtgaaagagtattttgaatgttcacaattattggaaatccaggttccaatcgtggcggtcatgggactgggagaaagctgtgataagtttgaaacgcagatgcagatgaaagaagcatttaaggagaaggggtaccatgcatacagtttatcttcaaatgatttgggcagtcttttttcaatggatacatatcctgaatttatgcatcaaaagaatctctctttttcagaaaaagtatttaagctgaattcttatctatatgacatatgtgaagaaaatcatccagatgtgatcctgttagggctgtctgggggaattgtgccgctttctaaatacgatcataactatttcgctgagacagtattggttgcagccaatgcgcttaagatagatattggtgtgctgtgccactattttatggacgatgatgagatgataccttatgaggaaatgcgggaacttgtgtggaatagatatagcgtacctatcgaggcgtttgtgatgtcccggcagagagttggtttcagcggcgattcaaaaggtctggattatatgtttttagatgacaaacgcgtcagccagcgaaaggtatcagatatacatttctcgtcagcatccgttactgatgaaaagcagatgaaaaaggtgttttaccgagtcattaatctgttggaaaataatcttgactttgtataggaggtgtttggatatggcggggtggactttggatgagatagagcaattaatcgttgagacaatggatgaggtaactggtgtaaagattacagattataaccagcatttattaagtgcagaattagatattccgcttgctgattttctctatgtaatcgatgagttagaaaagcggatcggacattccattacgaaactatttgaaaaggaagaatatacggtttttaatgtaaaggatttatctgctgccataatgaaagttataaccgcataaagcgattgcctattagaaggagtatatatgtcagttatagccattattgatgatagaatacatgagaacctgctaacggataaaagagttattcaaagatataagtatcatgaggaacggtttattcctactgaggaatttcattctgaacactactctcacgcgacgctgtgtgccatgatgttggagatgtgtgcaagtgactatgaaattatctcaatccagctctctgacaatatgctggaagaaccagttgatataaaggtgttgaatgccgctttacaatgctgtcttgccttaccggtcgatatggttcatatgagtatcgggacaacgcggctttctgaaacgatttatctatatgaatcaatctgtgcattggccgaaaagcaagtgctgatgatagcggcagttgacaatggggatcgctatacacttccggcatcttatcggcaggtactgggagtgagcagtgaccggcttgcatgtttacagccatatcagattgtttatgacgatgaggaatttctgggtgcacaggtgacagcaaatcatccgaaagcattgcctcgcctcaagaagccgctaacttcaagcaatagtttggccgttccaatagttgcggctaaatgtaacgatttgataaatcatgggattcgttcctatacggagataatggatgtcataaaaaaggagagtctttcatctgtaaatggttataaaaaatggcaccaaggaaaggggaagaccgaaattacaattccgcacctatgttttgttgcggatgattacgcaattcttgataagtgttatgaaatactcaatatcctgtttaccgattatggttatgaaggactatgctttacatttggcagggaatatgatgacattcgattttgttctatagattttgaacatggagtatttgagattgggtttatggaaagctatacaactgcggattattttctgaccgttattgattaccgtaatatagatcgaatccgctcggttgtagaggtggatgtctttgtctttgctaaagaggcgaactgccggaggaatacaaatataccgtgtatcaatatggaacaatacaaaaacttgaacatgttgtgtgattacttaataagagttttaccttagagtgttgatgtttacaaatcatgggatgttgtgctacataaatagaggaggtaagttaaatgaaaaaactttcaaaaaggattagttatcaaggcaataatgtacgcgcatttatcgcctgtccttgcggttcatctgcattatgtaattgtacgagtggaactacccttaactggaatcgttataaaactcagctggataatttaaatagttccagaaaaaaagattggttataaaaactaataaatagtaaccagtaaataagcgtaacatcccatgatttgaaaatataatctgctgattttgcagatttattattggtcaataaggtaatatgagggaattacatgaatatctggaaaagatcaaccatttatattacccgtaaaaaggggcgaagcatcttattatttctcatcttgtttttgatgggaacctttgtgctgaccggattatctataaataacagtgcaaagcaggcagccgaggaaatgcggctgagttttggctcgggctttaatgtttatataaagcaggagttaaacaggagtgataatgttgacggcatccccccgtttaccgtgcagcaagcggagtcggttggcaagatgtctgggataacacaatataatattgaactgattaatttcgcgcaagtggatgatataacactagtgccaggacttagggcagatatgatagacgtacaattgagcgatcccgattatgattttggctcgtcattagaagagctgagatgtgaggtaagatggacaacaattttcgggaattctgacattgaattatatgagcattttcgtacgggtgcattttcccttgcagagggacggcttatcagaagcggtgatcagaatacagctttgatttcagaacgtgtagctcaaatgaatcagttggaaatcggcgatacgattaccatcagttacactgagaatatgttaaatggtggtgatttgaataaggtgttaggcggtccgattgagttggagattgtcggcatatatgcaatgaatgcataccagccggtcagtgaatatacggctgaggctgatattgcagagaactggattctggctgatactgaaacgctggaacagttgagtgatttctattacgagggctttgacatatacccgtatattgaaaaggctacctattttgtggaagatcctgcgcagcttgatacagtcatccaggaggtcaaagacaagagcggtctggacgaatattattttgatattgtaccggatgatacgttgtataaatcgtcgatccagccattaaacacgatgcgtaaactgaccggcggtttgatcatcctgctattatgcgggagcgcgctcgttctctccctgatctttaccatgtggagcagaagccggaaaaaagaaatcggtatttacctttcgatgggcattggcaaagctacgatcgtgggacaattattagttgagtgcttggtcataggggtgctggcatttgggctttcctgtgtaacagcgaatgcggtttctaaccaggttggcaatgcctgtttatccgcagccacaccagaaccggaggaacctcgggacctgtcacagctatcccagcaggaactggaggaggctattatatcagggaatagcagcgaattatcagctatgcagacacaggatttgactcctgaaacactttcatttacagtcaaatggtggcaggttagccttgtgcttcttgccgggagcgcgattattctcttagcggtattgaggactgcatatgagatcctgaagatgacaccgaagcagatactttcctaggaggagtggtatgagcttatgaatatctggaaaagggcagctatttaccttacccgtaaaaaagggcgaagcatcttattgtttctcatcttatttctgatgggaacctttgtgctgatcggattatccatacataacagcgcgaaactggcggccgaggaaatgcagcagagttttggctcgggattcaatgtttatataaagccggagttaaacaggagtgataatgttgacggcatccccgagtttactgtgccgcaggcggaggagattggcaagatgtctgggataacacaatataatattgaactgcttgatttcgtacaattggatgatataacattggtgccgggacttagagcatacatgttagacgagcaattgaacgatcccgattgtggttttggcacgtcattagaagaactgagatgcatgatgagagagacaacaattttcggaaattctgacagtgagctatatgagcattttcgtactggagcattttcccttgcagagggacgacatatcaaaagcggcgatcaaaataaagctttgatttcagaacgtgtagctcagatgaatcagttggaaataggtgatacgattaccgtcagcttcacggagaacatgttaaatggcggcgatttgaataaggtattaggcggtccgattgagttggagattgtcggtatatatgcagtgaattcataccagccggtcagtgaacatacggctgaggctgatattgcagagaactggtttctggctgatactgaaacgatggaacaattgaccgattactattacgagggctttgacatatacccgtatattgagaaggctacctactttgtggaagaccctgcgaagcttgatacggtcatccgggaggtcaaagacaagagcggcctggatgaatattattttgatattgtaccggatgacacgatgtataaatcgtcaattcagccactgaacacgatgagtaagctcaccggcggattaatcctcctgctattatgcgggagcgcgctcgttctctccctgatctttaccatgtggagcagaagccggaaaagagaaatcggtatttatctttcgatgggcattggcaaagctgcgatcgtgggacaattattggttgagtgcctggtcatcggggtgctggcattagggctttcctgtgtaacagcgaatgcggtttccaaccaagttggcaatgcttatttatcagcagttacatcagaaccggaggaacctcaggatctgtcccaactatcccagcaggaactggaggaggctattatatcaggtaatatcaacgatttaacagccatgcagacaccggatcttactcccacaaaactgtcattcacaatccaatggcggcaggtcagccttgtgcttcttgccgggtgcgcaattattctcttggcggtatggaggacagcatatgagatcctgaagatgacgcccaaacagatactttcttaggaggaatggtatgagtctatggaagagagcggttctctatattgtcaggaagagagccagaaatataaccttaatggtgattatgctgaccttgacgaccatctcattattgggaatgacaatcaaacaggcggtatctacatcagcggagcagctgagaaagagtctagggggatattttcgactggagagacttgcagatgctgctaggaatactcagattaccgataagctgatcaacgatatcatgacggataagtcaattaccggtcacaatgagatcaatgcttattacttatataccaaagacctggaattagagcaggggatgaattatggtactggtaatattcaggaacatatgccaacgctgattggtacttacaaaagtgagaagtatgaatcatttttgaacggggcctttgaactgacgaaggggcgtcatatccggccggatgacgaacggaaagtgattatttcagaggctttggcgcagtacaatcatctggcagtgggggatttgatttccggggagattgcacaggacctgccaggggcctctgacgagtcgattggacagtcatttgactttgaggtggtgggaatctttcatctgaaccgggccaatccagatacaggtgcttcaaatgagtcagatattcaggcgaattatatctttaccgatggggcgagcgccaaaaaagtaatcagtattatgcgcggcagagaatgggatggttataatggtggtgcgtactttttcgtcgatgatccgaaggagatgggtcagacaatagaacggctgcgccagcgggatgacctacagcttgatgagtttaagatcaatagcaatattaaaacctatcaagaggcggcgtctccgcttacgaatatgaatacgatctgcaccgttttattaatcatcatcctggttctgagcacgttgctgctatctttgatattaatgctctggatgagggaaagaatgcatgaaatcgggatattgatttcaatcgggattaacaaacttcagatcctgcttcaattcatgatcgagagtctgttgattatggttctggcatttgtgctgtcctttggcgtggcaaagagtgtggttccagtgattggagagaatgtgaaaagcagtatcagccagcagcagaaggcggcttcggatgaatccaggcaggctgctgtaaacagtcaggaactccggattgagattggttacaaagagtgcctctatgtctttttcatggccatgatcattaccgtaggagcggtttttatctcgacgctttccgtattccggctaagaccaaaaactattttatcgtcaatgagttaggaggggaattgtatggctattatgcaggtcaaagaagttacttactgctatacgtcgggcaaaccagttttaaaggaagtgaacatgacacttaatgcgggtaagatgtatgtcatactgggaccatccggttgtggcaagacaacgctgctctcgctcatgggcggactggatattccgtcaagcggacaaatcctgtttaataatcaggatattgctcagattggattgggagtacaccggcgtaaggacgtggcgtttatttttcagaactataatttgattgattatatgacgccgaaggaaaatgtggaattaacagcagtatctgatccagtagctatactaaagcaggtgggattaaccgacaatgaaatgaaacgcagtgtactgaagctgtcagggggacagcagcagcgtgtggcgattgcccgggccctggcttccgaagctccggtcatcttagcggatgagccgactggaaatctcgacgaacaaacttcggcggaaatcaccagattgctgaaagaaaaggccagagactttcataaatgcgttgtaatcgtcagccactccaatgagattgccaatcagtccgataaggtattccgcttatctgatggaaaaatcagtgtatttgatcaggagcagcattcagaagaggtatgagtatggctgacaagaaaaccaaacagaggctgggaagcctgttgaagagattagtggttcatcggttccctcttgtcattatattattctgcttgattttcaccgggatagctacttttttgcagcctctgataatccaacgaataacagatgatgggatggcgacgcggaatttcagtaagataatctggtttgccttgttgctgctggttatatcgggactggaagaaatctttatgttaatccagagtcgtttattcgtggagctgcagaataatattcagctttcgttatatggcgattcttttcgtaagctattacatctgaagtcagattactttatcgataagaatagtgctgaaattgtcaatcagattacttctgatgtcagtacaatgagtacgattgctgaccgggctgtgctgtatttcgtaagctttctactatcgattatcggtggaatgattggacttcttatgatcagttggaaaatggcattgattgttatgctggttttgccgataaagtatctgattactaagattatgtctcttagacaggagcagattaccgagaagtatatcaaactacttaccagtttttcggcctggtttggggatcatatcaatggaattcgggaaataaaactctggaatcttcagcagcggaagtttgatgaattcataaaacaacaaaaagacatcgttggagccaataaagagatgacgatgaacgatgccggcaatacagtattcaatggacttattgaaagaactattaaaagtatattgtacattgcaggtggttttttgctatgcaaaaacgagcttacaatcggcggtgtgattgcgtttattgcttacagtggacaagtgattgcgccaatctcggctattttgcagattcggatgctgtttgcccagatatcgccggcgatgaaccggttatttgattttctggagttggatgaagaaaaggatgaagggaaaagagtgattccatttcagacggtggaacgtattgcaatggattctgttacttttggctatgatgaaggacggcaaatacttgagaaagtaactttttcagcaaaacgtggagaaaaggtggcgattatcggggcaaatggaagtggaaaaacgacgattattaatttattactgcgcttttataacccacagtcaggtgtgattacaattaacggtgtagatgcgggcgaatttaagttaggggaataccgggatttattcagtgtggtcagtcaagatccttatctatttcaggacttgatcagaaataatattgatctctgccacaagtccacagaggaagaaattcaggcggcatccagaaaaagtgggtttaattctttcatttctaaccttcccaatgggctgaacagcttggccggacaagatggcgccaatctttccggtggtgaaaagcagaaggtggcagtggcaagggcaatcatcaaagatgccccgattgtgatttttgacgaggcaacttctaattttgatgttgagtcggatatgcttttacataatattataatgcaggagtttgaggaaaaaattcttattttaattactcacaactataaaaatctatacggatttaatcggatttatcaattgacggacggaaagcttaaggaagttgagcttaaaaatgtttttttgctgcatgatctgtgaaaggaggaacgagtgttaaaagtggcagacgttaacgtgaagtatgtactggtcggtgcggtcaaaactgcagaccgtgttgtccgtgagattatgggcttatacattttgaattttctgcgtgtattgacttggtagtatgaaatgagtataatatgtttagaatactactacataaaatagccaggaggtgttgttatgaatattcgcccatccgcagcaatccgtcaaaactataatgagattgccgatatgtgcagaaaaaccgaagagccggttttccttaccaaaaatggggagggagatttggttgttatggacatagaaactttcaatcgcagagaaaaaatgctgaagctccgtgaagaacttctggcagttgaggaagacaggattgcaggaagaaacggctgtaccctagacgagctggatgcgtaccttgatgaagtgattgcagaggtatagcatatgacagaaaacaaaaagtacaaagtaattgtttccgacagagcaaaacggatgttgggaacacatatccgttttatggcacaggtcaacaaggaagcgtcggtatcgaaaaagaaagagattatgtctgtgctgcgttctttatcccaaatgccgcagtgttttccgttctttgaggagtcgtatatcacaccgaataaatatcacaagatgtttaccgaaaagtggtatcttgtcctttatcaaatccaagatgatacggtgtatgtggagtatattcttgattgtcggaaggattacagttggctcattcattaaaatgaaaaatgcctgtaaacggggtggttgtgggaaagatggattgagagttcgcaaatcagatggaacagtaaaatagaatctactgtggctttttacaaatattggtcctcacaaatggcgtatgcgcgctgtttgtgaggattttattgcgcaaaaacaattcggtcttccatcaatgattgacaaaaaaatcactatgtgataaaattaaaatatcagaaaattataaagatactattaataaaacaattaataatataagaataaaacaaataaacagaataataagctgataaatggtgagaatttttaaaatgagaaaaagacatttcattaaaaaaagaaagcaatttgtaagtatatttttaattccattatttgtattaacaatctccggagaaaaagcggaggttgtttttgctgatgatggaaaaaatattactcagaattgggcggctgcggcagtgttttataatacaacagcggatgaaacagaaacatatcatatgacggatgaagaatttataaatactaagacggagttagaatcgcggttagtgtatgcgtacagtacatattacaataaattgccggaagcagaaggggaggcgttgaaagaagcacaaaaggcgtggatcgactgctattattcctacgtcagtgctttggagcagcgctggctggagccggtgaagattttctttggtgttacaggaaaagaacggcgcactaatgtataccgggaatttatattgctgctgctgacgaaccggatcacggatctggaagagtggaatgccggtgaatttgctgagatggaggatgcatttgcgccttttaagaaaagcgaattagaaaaagaaaaagaacagctgcaggtagatatgggattatgcctttatgtgatccaggaagaatacagacagaagatcaaagcggcgcataagaagttttttacatttttggaaagtgatgagagattcatctcattgatcaccaatgagaatgagataataattacggcagaaggactgctccaggtacagcggatgagttatttgaccagtgtccactatcaggggtgccgttttttccgccgggaacgggaggaatgattatgcggtagggaaggttgattaggttaggaagatgtgacaatgatgatgtatcaattttaattcagtgaaaggagcttgagaatgaaaaaaagcatagtaacgattttagtgatggctatggctctgtttctcgtgtcctgttctacggaaaagcaggataaaggatccggcggtacaaaagtgaaactggatgagctgtcaacgccggcggaagagagcaagtgggagcggaccacatcctcagaagaagttcttgagttttgtaaaacagttgcggaaaacagcggcggccggatcattctcgatgatacaagctttaagacggagctggggacaccgataccgtacatgatcataagcgacaaggcgcccaaaagcccggatgaggtagatgaagataagggagtagtctatgttaactgcaacattcactccggcgaagtagaaggtaaggaagctatgatgatatttgccagggaagtggctcaggggaaacatgatgaactgctgaaggatctggttgttgttattgttccgaacagtaatccggacggcaatgacgaccttgataagaaccggatcgagacccagtttacacctaagctggtcggtacgcggacagaaggaaatggccttaatgtcaaccgtgatatgacgaagcttgagagtgcctgtgcgcgtacgatagttcaattgatgaatgactggaatcctgttcttttcattgatgcccatgcaacggacggctcctatatgcgccatgcagtaacttataactggggattaaatgcaggaacagatccggagctgttagaatataaccgggatgtattctgctcccgtgctctgcgcaaaggttcctatctggaatctaaggggaaagtatctgttccgtatgggaactggggatattactatagcggcatcgtggacgaaggatggcgtacgtttgaggattatgccagatacacgaccaactatgccgggctgcgcaaccgtctggctttgctgctggaagtttattcctatgatgaattttccaagcgcgtcgagacacagtatgagtgcatttacggtgcgttgaaggtggttgcagaagataaggatgagattaaggaaatgatcgccgcggcagatgcccggtctttggagcgggagaaaaatggaatcgatccaaaacgtgatatcgttgcgctgaactccgagatgacaccaatgtcctttgaagggaaggataaacttactgttttgtcatatgagactgacgaggaaggccaagtgataggaacgagattatatgacgacgagggggatccgtatgatatagagtatggaaagcccgttgactacgagacggagtattggggcacattcgttccgacagaggttgaaaccatgggggcctattatttaattgatcaggactgtgctgaatttgctgagcttatgaaattccacggtgttgagatgactcagctgaaagaggaaattacgctgaatgctgaggattatctacactttggtattgaatcatatacaagcggcggcgccgttattgacggcactccccgtgataaatatgaggggcattatcagacgcttgttaaaggcggatgggtgcagggagataagtccatagtcattcccgccggcacctatgtgatatctaccgcgcagcgttttggctcctttgcggccttaatgtgtgaacctgccgctgttgacggaggagtggcctggaatttctttgatgattattttgacagcaaggacggaaccttccgcgcaaattacagcaatactgtaactgcagaggctggtaccgagaaagaaagaacggaagagatatcgatgcctatattgaagataccaaaatttgatacgataaaataaaatgaccggcccatttcgtaaagtattattgaaatagaactcttttcgcatagccgctgcaaaatggatgtatgatcatctgtagtgcagcggctccttattttcagtacggaggcacgttatacgggataccgtctccgcatgagaagcttttgtttgttttaccgccagtcatggaattctttaatgaaatctttatcaattgggcgcagttcatgacgtctgctcgtagccagtatgatttcccaaaaccagcctgcgcttatgtcccgcacaagcttaatgccttctatagggaaagctttttcaggatatccgacataaaatccaattccccggttttcccggaccatctgatacaggatattcatgtcgtctacttcagcatagagaacgggttcaaacccctctgcttcgcaataattttttaatgtgttgtgccctttattctgagctccaaatcctatgaatttctccccgcgcatgtcacggatcgataatttgtccttttctgaaagaggattttgtgtactgatcatataatatgtatttgcccggtatgttttatgaatcgtaaatgattctgacgatataggggcaatacagaatcctatatctgcggttccgtccgacaatgccttctccacaccgaggtcatctgtctgtgagattaaaagctgtgcgtcagcattatggctataaaagctttgcagctgtccgccgatcaactcccatgtcattccccggggaatcgcgatcctcagttttccataatctcttgcaataaaggaatgcatattttcgttcagcattttgaactcatcacagagatttctggccagtggatagagataagtgccatattctgtcagccgcagtttggaattttcccttataaataacggcactccgagggatgtctccagatgttttatgatcttgctgataccctgctgtgaaaaatgcagttcttttccggcttttgtaaaattcatatatttacagactgttataaagcagttcaaatcttgtatatccatagaagtcccctcattcataccacaacgttaagttgtgacattacaatatattgctcgtgttgttttgttaacaatcttgttagaattttatcatagataagacaaaaagaaaaggagaggaacgtatgtttaagatgaaatatcctaatttattcaagccgctgaggttaggcagtgttacactccgcaacagaattatgagcgcgccgcaggggtttctccatttagatgctgaaagtctgccgacacaggctgctgcggcgttctatgaagagaaagcccgcgggggagccgcggtggtaacagtcggagaagggtatgtagacacagtccacggcattgatatcccgaaagggatccaccttgatacggacgactgtatcgggggactttcacttctggcggatgcgatcaataagcatggagcggtggcgtctatggaactgcagcatgcaggaatgtacgcttcagaatcatatgcaaacgggaatccgatctatgcgcccgtagaacggatgggagaaggcacaaaggccggagcaaggcttcacggagtacggatacctgaaatgcctgagaaagtaatattagataccatcgaaaaatttgccggggccgcgctccgctgcaaaaaggccggatttggcatggtgctcgtacacggcggccatggctggctcttaaatcagatgatgtcgcctgttatcaatacgcgctcggacaagtggggaggaagtcttgaaaaccgtatgcgtatgccgatagccgtctgtgacagaatcaaagaagtatgtggaagagattttctcatcgattttcgcttcagcgcggcagatgtgtgtaatcctgggggatacagaccggaagacgggatcgagatggccaggatgatcgacggacatgtggacttgatccactgttctgtcggaaatcatgaagtggaggaatcttttgtagtcgttcatccttccatgtttctggaggatgcgtgtaatctgaaatatgcaaaagaggtgaaaaaacatgtaaagactcctgttgtagcggtaggagcattttcagaccctcagctcatggaagatacgcttgcaaaaggagaagttgacgttatcgccatggcgcgcggactgatcgcagatccggattttccgcgcaaggtgcgctgtggaaaagaagaggacatcaacaggtgtctgcgctgctatcagtgtttttcaggacttctggatacaagacagttctgctgcgccatcaatccggtcattggccgcgagcttgaaaataaatttgagacaactgcatatgacaggaaaaaagtgctggtagccggcgggggcatcggaggaatggaagcagcactggaagctgcaaagagaggccatgaggttatccttgccgagaagacaggaaaacttggaggagtattgctctgtgaatccgatgtatcatttaagaaaaacctggatatttatctcacagcgcaggcaaggcgtgttatggagcatccgtgcatcacggtgcgtttaaatactgaggcgacaaaagaacttgcggaggaaatcgctccggacgcaattattgccgcgttgggagcccgctctgttgttcctgcatttataccgggatatgaccgggaaaatgttgccgctgcagaaaaagtttattatgaccattccatggccggaaggaaggtcgtgatcctgggcggaggacttgtagggtgcgagctcggtattcatcttgcgcttcataaaagagatgtcacgatacttgagatggctcctgagcctaattttgcaggaaacatgcttcacggagaggctgtgatggcacagatcggcattcatggcatacacctgatgacaaacacgagagcagtcgagatcaaagaaagcggtgtaacggccgacggtccggacggagagctgtttgttgaggcagatacggtgatctatgcggtcggacagaagccgctcagcgatgaagcagaggaacttcgattctgcgccccggaattttatactatcggcgactgcggcgtgcccgccaacattgcgaaagccaccaaagaggcatattatgcggcccgcgatatcgggcgtatctgagaaatagatctggaggaggagaacaatgaagacaaacaaaaaattattgacgctcacaattttactcatttcggcaacagaaatgggagctatgggaatagccccttcacttgcttccatagccgctgatttcccggacacccctattacaactatcatgaatatcatgaattttccgggaattacaatgattttagtcgctcttatcactccgtttttgataagagtcattccaaagaaaatactctgcaacacaggtgtcctctgctatgcggcaatcgggccgttaggatacctgtttaacgacagcgtagcgcttctatacatatgggcaggtcttctcggtattgggtttggcttgttaatgcctacttcaaacggcctgatcgccgatttttactcggaggaagagcgcggcggtatcatgggaatgcagactatgtttacgaatcttggagggatataccttacttacgcgggcggcctgctggccgcggtatcgtggcacatgaattacctggcatactgcatcggtttcattccgtttatattaggatgcgcggtgatcccgaaagaaaatatggaaaaaacaaaagaacaaatcaaaaaagaaaaagtgcgtatgaatccaaaggtttttatgtatggtatttttatctttattttcatcgccacctatggggtgtttaacaataatatgtccttcctgatcgaatcgagaggaatcggagatgccgccacctccggtacagtcacggcgctctttcttgtaggaggcgtgcttggaggtattctctttggacctttaaataaaaagctgaatgactatatgtattgtgttgggtttggtttccttgtggccggctatctgcttgtatatgcggcgaacgggcttcctatgctcttttgcggagccgttgtctccggcatgtcgatcagtcagtgtatgccccagtcacttctcggagcgaccaactgttcaaaagtagcaggagttaccgcagcctgcatggtcattcatgtcggaggccagttgggaacatttcttgggacatacttctatacgcctgttccggcgatgctgagtgatgcggtcgacttccggtatatatttgctgcggtcatggctgcggtcatggttgttgtgtgcacggtgtgcgtgacaattgtaaataaaaaagaagctcatgcgggaaaggaataaaaatgacaaaatttaatcattataaatatgtttttgaaccaattcagatcgggaatatgacggtgaagaacagaatccagttttctcctcttgtctgctctctttccggaacaggcggaagcgtaacgagggaatatctggagtttatcaagatgcaggccagaaccggtgtgggagtggtaaatatcggcgcaacgtctattgaccacgataccggcacagactatatcggagagctggacatcaccagtgatgataatataattgaactgttgcggttatcggaagcagtccaccggtacggtgcaaaaatatctattgaaattgtacatgcggggcgcggagcggatcccagacttttaaaagttccggaagccatagcgccaagtccgatccctgtgacaaatggaaatacacatatacgtgaaatgaatcacgatgatattgaaaaaattaagcagcagtatgccgattgtgcagagcgcctcgtcaaggcagactttgatatgatgatgatccatgctgctcacggcaacctgatcgctcaatttctgtctccactgttcaacaaaagaaccgaccagtacggtggaacggaggaaaaccgctggcggtttgccctggaggtactggaagccatacgaggacgtgtcgggaataaactggctattgatatgcggatcagcggagatgagatcatcccgggcggcatgaaaatcaatgatacggtccggttcattaaagcagcccagaaatatcttgatacagtacacgtatcacaggggctgatcgtggagcctgagtatgcgttttacactatgccgccgctttaccatccccactgccacaatgttggatattcagaagtaataaaaaaagatccggaaatccacattccggtcacgacagtgggaagtatcatgacgatagacgaagcggaggagatcattgcttccgggaaggcggatatggcagcaatggcgagacagcttctctgcgatccgatgacgatcaaaaatgcatatacagaacaaaatgaaaagacaaggccatgtctccgatgctatgaatgtacaccggaacgtatctgtcatatccgctgcgcaacaaatccgatgctcggcagggaagctgaatttacggaagtaccggctgcaggaagaaaaaagaaagtagtagtcgcagggggaggcgtggcaggatgtatggcggcaaagacgctggctttgagaggacatagagtcattcttctggaaaaaaacgaaaagcttgggggaaaacttcatgaaatcagctgtctgtcctataagactgatatgagaaggcatctgaagtggctcattgacagtacgatgtcctgcggagcagaactgaggtttcacgttgccgcagatgctgattatattatgtcgcttgaaccggacgcagtatttatagctacaggttcagacaggctcgctctgtcgattcccggtattgacagagcaaatgtacatcatgtgttagatgtggataccggaagagaagagacgggagacaatgtcgttgtgtgcggaggcggattgtccggcatggaatgtgcgctcggacttgccatgcagggaaagaaggtcacagttgtggacatgataccggccgggtcgttcgcgcatgaggctactccacatacacgcggcatgctgctttcacttcttgaaacgtatggcgtgaaaaaaatcggggacagcagagtatgcgcattttcagaagaaggtgtagagattgaagaccggaactggaagaaacaggttttaaaagcagacgatatcgtaacagcattcggcatgaaaaaaaatgatgctttatatcaggagctcaaagaacttctgcctgaggtatacgccatcggggactgtgacattgtacgtaatattaaacacgccaatcagcaggcatttcatctggcattagaatgctgatgtccgtaaaagactttaccttaaaggaaaggaagaaagggtatgggtacgtgcagaacgaataaaaagaaggagatcatcagtatcatagtattgttatttgccaattcatcagcagggggagccgaatggtgtacatccgcgctggcagatattgcccgggtatttccggatgtcccgtacagcatcatcactttgataaataatattccgaacctgtgcgcagttgtttttaccgttgtggcaggtgttctggtcaaccggaagatttctctgaaacatatgatgctcatcggcatcggatgtcactgtatcggaggtgtatttcctgctttatttggtaatacaagtattatactcatatttgcgggacgttttgcatttggtatcggctatggtctgatgcagggaatcggagtgtctatgagcttcaagctgatccaggaggaaggacttagagaacatgctatgggatgggctgttacggcgcagtacgccatgaatatgctggcacaggtagttgtagggcatctctgtgcggtccggtggaatttctcattctatatctatgcatggagcgcagtttcctttttggtcgtactctttctctgcccggcatttccggttaagagtgatgggcaccgtacatccggcggtggccgggggcgtatggataaaggaaagtctgcagtctcgtctgtcagatcacttccaccgacagtctgggtgtttacaagtatagtggctgtttatatgttcagctattaccccctgtttctggccgtcgctcccgtaataaccggcagggggttcggaaattctgtaagtgttggctacgcgatggtattttacagtatcgcgactgttttaggcggaatcatttttggcttcgccgccagggtcttcagaaaatggacactttgtattttcatgtccggcgttgcattgagtatgctcggcctgtactttgcagattcctttacaatagtctgtatcatgttgtttctatcgggaatcacatctacaggcatcattccggcctgtatcagcgtatattacagacaggtcccagaaaatcaggcatttctggcaacaggcatcacggaagcaggtgtgaacataggagctttcctcggaacaccttatatagcgtttttagaggcttttggaggaaatgcagtcactacgatgatgatctcaccggttattctgatcgtgttggggattgtatccgtaagattcagtaaaaatatgatagagtaagatatctgaatgcagacagagcagacaatagatagagaaagcagatacgccggacggcgtatctgctttttatagtgtatttatgctatactatattatactgtgacagaattcaacctggaatatatatcagacatatgtaaggagagatacaaaagacaatgacgatcggaatcatagaagacgacagattattgaaccgggccctgaacatcgccctgaacaaagaaggatttgagacaaactgcgcttatacataccgggaaggcattaggatggcgcaggaaaggaatgatctgctcctacttgacatcagcctgccggatggaaacggaatagagctgtaccgggagattcttaagacgcggagcatcccggccatttttctgacggcacgggacgaggaggcggacatgctgacggcatttgacgcaggggcggacgactacgtcgtgaaaccgtttccgatgaaagtgctgcttaagcgggtggaagctgtgcttagaagagggtcggaccaaagcggcagactttcctgggagggactttgcctctatcagaaagccaaaagagtctgcctggaaaacagggagatccagttgacgccgaaggagtaccggcttctggaatttatgatggagcatagaggacaggtactgtcaaaggagagtattctggagcatgtctgggatattgacggccagtttgtcggggacaacacagtcagtgtcacggtgaaccggctgaagaaaaaaatagaacctgacgcccggaatgggaagtttataagtaatgtgttcggcatgggataccggttcggcagatgatattttatcggggcagagaggagagaagtggaatatgtggatctggatagcgggagcggctctcgcgggggcggtctttggggctggcgcggcccggcttgccggaaggaagtgcaggcagagagaactcggggagatatcagaccttgcggcgcatatattgaacgggacggagatcgcgggcagggcagcctgtgaggagacactttacgcccgcatagaaaatcagctcatacgaatacagagaatgacacggggaaagcaggaagaggctgaaaaaagccgtgagcgtatccagcagctgatcacggagatcgcgcatcagatgcgaacgcctcttgtcaacatggagacatatctcgaatttctgcaggatgaagacataagccgggaagaggcagaagaatatgttaccgcagtccagctgtcggaacagaaattacattttcttgtggagagctttatcaagatgtcccggctggagcatcatattatacagatcaaaaaggaagagacagacctggctgccacaattttcagcgtcgtttcacagatgaggaaaaaagcaggggaaaagggaatccgcatcaacgcagaagtgccggagaacctcttctgtccgcatgatgcaaactggctcggcgaagcgctcgtcaatgtgctggacaacgctgtaaaatacagcgctgacggcggaagcatagaactgtcggctgtgaaaaacgacatgtttctcagaatacggatacaagatcacggtatcggcatagaagaaggggaggaaaataaagtatttcagcgtttttaccgcggccgccgtgtcacggcggaagaaggattcgggatcggcctttatcttgcaagggagatcataacccgtcacggcggatttatgaagatatcgcgggaggagccaggagtggtggcggaaatatatcttgaagcttccggttgtcagtagtttgttagatttgtcctttatactgtaagagaacaaagaaaggaggcataagaatggagatcgtaaaggcagcaggccttcagaagtattatacgaatgcgtcttatgaagtacgcgcccttgacggcgtcagccttacagtggaggaaggggaatttctggcggtcgtcgggagttccggcagcgggaagagtacgcttttaaatatgctgggcgggctggatgaacctactgcaggaggggtgtggatcagaggaaacagcctgagagacatgagcagggaggagcgcaccattttccgaagaaggaatatcggatttgtatttcagcagtacaatcttgtgcctgtgctgaatgtatatgaaaatatcgtcctgccgctgaagctggacggagcccccattgatgaaacgtttatcgaccatatcatagacgtactggacataggggaaaagctttatgagatgccggggacgctctccggcggccagcagcagagggcagccgtggcgcgggcgctttccgtgaaaccggcgatcgttcttgcggacgagcctaccggcaatctggattccggcacgagtatggaagtgatgggactctttaagacgtgtgcagagcagtttcatcagacgctgatcatcgtcacccatgaggaagaagctgcccagatggcggaccgtatcgtacgcatcgaggacgggaagatatgggggcaggaggggaggtcatgagacagaacggcaggcataccccgaatgccaatactccggtcatacggatgctctgcgcggcagtctcaaagagcagcaggggcaggaaccggattcttcttggcgcggtcatactcggaattgtaacgctctgtatggtattcggcgtttctttcggcaagatccaggcggagtatttaagatccatacggcagtccggcacagccgcgtccacatatcttgaggacggaacgaaagcccagtacaacaagatcaaaagtctgagctatatccgggaggtagggagaagctggacgcccggatatgcatataaagaagccggcggtgaaagtctgtgtgaaataacagtgttggataagacggcctgggatgtgatggaacgccctgcttacaccggtatagaagggcactatccgcagaaagcacaggaactgatgctgccggtgcgcgcgcttgaggatctgggtatccgtacgccggaaaaaggaatgaaactccactttataatagagataggactgttccggacggaggaagagacctttaccctgtgcggatggtacgaagattatgcggagccggcctcgaatatggccaagggctacatatcagaagaaaagctgaaagaatggggcggcagcatggaaaagccggatcatcttctcatccggcagaaagacagcatggatggccggcgcacagaagaaaagctttatgacgatatccggatggccgatacttctcagacatttacaggcggtaatacatatgcatacgatgcagtaaaccggttcatgggcggttacggcatggcggcattcggcgcagtccttgtgctggcaagtatattctttctcatccataatgtcatgcacatatccatggcaaaggatatccggcagatagggcttctgaacacaatcggcacgacggcgaagcagatccgcggcatttatttcagacagatactgcgtattctggcggtgggaataccagccggtgtgctgatcgcggcgttattgctgtcagctgtggttccgcagcttctcggaaggcagtatcttgcccgttatggcggggcggccggactggatgttctgcgcccgcagatgcttgcgctggcggctgtatttaccggcattgtgactgcggctgcggcgggagaaacgatataccgggcggtcagccgctcctgcatagaagcagcgaattataacgggatagagcagccaaagacaaagaggagggttaagaaggcggcggtactcagacgccggacaccaaaacgggaactgtggtatatggcatggcagaatctgtgccgattccggggcagatctctgcgcacggtactgtcgctgtttctcggactggaggtggcgctctcagcagtggtgatcgcctcgggggcagatcaaagccacgccatagaagcgcggcccgatattctcgtggccggggagttcagctcctggggaaaggcggaaggctatggggaggaatataaaggcagggatccacaggatgacccgctggagacagagggcggcaacctggccctgacttcggacaatgattatgattccttctcgccggttggcgaagaagtaaaagaggaactgctggcggtggacggagtaaagaaggaagagtcatacgccgccgagggcggctatatgtgcccgttgtatacgagaaaaggggtccgtcccatggttgcggataaagaatcagagacagatgaaaactataccgccaaccttgatacagtcatacaacttattgaagcgggagagagcggtacgatacagatcctgggccggaaggagatagaggagctgaaggaatttgcggaaaaaagcggctcaccggctgacatggagagtctggagaacggcacaggagtattgcttctgcatgaccatatactatctccggccaaggaaaagcaggcagaagaaagtgtgggggaaccgatcctattttcaaggttatggtccaagaaagagcgtgacaggcggttgaacgccacagcgcaggaacgggagaagatgggggatattgagacagaaaaatcggagaaaatgacactgtgcggttatatggatacaaaggcagaagggtttccggctctgagacgtacgtggcacggcccccgcattgactattttgtcatcagtgaagaggggtttaaaaagcttggaacggcaaagaagaccttttatatggaactgaatgtggaaaaaggcaaggaactgtcggccgagaaagcagtccgccggatcttaacgagggagaacggcaggcggggggatgaggccggattgtttcttatcagcaaggccggactgcttcaggaagcccaaagttatatacgaggaagcagactcattctgggcattctcagtatggtgcttatcgccgccggcctgatgaattatctgaatatgatggtgacgggtctttggtcgaggcagagggaatttgcccttatggaaggggttggaatgacacgcaggcagctgtgcgggatgcttgtgatagaagggctctattactgcctgctgaccgccggccttatgctgacggccggaagcggcatacttttcctggtacatctttatatgaaggcgaagcttgcatattttacatttacctgcccgtgggcagtgtttggcgtcatgattctcgtactggcctgtatctgtgtctgtgtgccgctggccgtctcgagaaaaacaggaaggacagggcttgcaaaacggctggcacagtcaaattgattgtcaatagatagacaatcgtgtgaaaaataaatcaattgagcgagatgttaataaaaaaacaattattgacagaatatttaaatgtcgttataatctaagtagtttcatatatcggatgatggatttaagagagtctatctgcgggatagcgccgaaggggaaagggatgaccgaaactctcaggcaaatgaattagattcggacgatactctggaggacaggggtgagtatggatatcagcaggatatttatatttgcccctttttgtatatgagaagcccggttaaaatgccgccatcaccgttttaacatggaaaagtgaataaacagacaatggaggaggaaagaatatggaattaaagacaccgctgtatgaagcgcatgtgagggcaggcggaaagatggttccgtttgccggctacacactgccggtgcagtacggcaccggagtgatcaaagagcacatggctgtgcgggagcgcgcaggcctgtttgacgtttcccacatgggagagatcctctgtgaaggcagggacgcgcttgacaatcttcagatgcttctgacgaacaatttcgcgaatatgtcggacggacaggcgagatacagtccgatgtgcaatgagaaaggcggcacggtagatgacctcattgtctataaggaagcagatgaccgttattttattgtcgtcaacgccgcaaacaaagataaggattacgaatggatgctggcgcaccagtcgggggaagtcacgtttaccgatgtgtccgaacgctatgcccagcttgcgcttcaggggccgcaggcgatgaagatcctcaggaagatcacaaaagaagaacatatcccgcaaaagtattatcacgcggtgtttggcggggaggccggcgggatcccgtgtatcatttcaaagacaggatacacaggcgaagacggggtagaactgtatctggacagtgaaagggccggggaaatgtgggatctcctgctggagaacgggaaagaggagggactgatcccatgcggtttaggcgcccgggacacactgcgcatggaggcttccatgcctctctacgggcaggagatggacgaggatgtgacaccgcttgagaccgggcttggatttgccgtgaagatgtcaaaagaggactttatcgggaaaaaggcgatggaagagcagggagaaccaaagaggaagcgcgtgggacttaaagtgaccgggcgcgggatcatccgggaacatcaggacgtatatgcggaaggtaagctgatcggccatacgacgtccggcacacactgcccatatctcggatatccggtggctatggcgcttgtcggcgcagaatacgcggagcccggcaggacggtgagcgttgaagtgcgcggacggatggtggaggctaagatcgtaccgctgccgttttataaaagaagcaagtaactgtaaacggaatagaaaaagtaaaaaaagaaaggaatgaatgttatggaattaagagaggatatgaagtattcaaaatcccatgaatgggtaaaagaagaaggagacgaggtcgtgatcggcctgacggactatgcgcagtccgagcttggagatctggtgtttgtcaatctcccggaagagggggatgagctcacggtcggagagtcctttgcggatgtggagtcagtgaaggctgtgtccgacgtatacgcaccggtttccggcgttgtaagtgagatcaacgaagagcttctcgatacgccggaacttatcaacgaggctccgtatgatgcgtggttcgtaaaagtaaaagagatatctgaaaaggaagaactgttatccgccggcgaatatcaagcattcgtggagagtgagaaagagtaaggaggtgtgcctgtgggctcatatgttccaaacacggaagaagaacgaaaagccatgctgcatgagatcggcttttcgtctatagatgatctgtttatccatattccggatgaagtaaaggtgaaagacggactgaatctcccggaggggatgtccgaactggaagtacgaagaaaaatgcagggcatggcggcaaaaaatacggtatttccttccgtattcaggggagcgggcgcgtaccgccactttatcccgtccatcgtcaggagcgtgatctccaaggagaatctcatgacagcttacaccccatatcaggccgagatcagccaggggatcctgcagtcgatctttgagtatcagacgatgatctgtgacctgaccggcatggatgcctccaatgcctctgtgtatgacggggcgtccgcagctgcagaaggagtagccatgtgcagagagcggaagcggaaaaaggcatttgtttcagccacggtgctgccctatgcgctggaaactgtcaggacatactgtttcggcaatgagatgcagctggaagtgataccggaaaaagacggcgtcacggacctttcatatctggaagagcatatcgatgaagagacggcctgtgtctacatacagcatcctaattactatggcagtctggaggacgctgaaaaggcaggagagatcactcacaaagccggagcgaaatttgtcatgggtgtgaatccggtctctctcggcgtgctgaagacgccgagggaatacggcgccgacgtggctgtcggggaaggccagccgctcggactgccgctcggcttcggagggccgtacctcgggtttatgacctgtacggccggcatgacgagaaagctgccgggccgtatcgtcggtgagacgaaagacgcggccggaaagacgggatatgtgctgacgctgcaggcgagagaacagcatatccgcagggagaaagcttccagcaatatctgttccaatcaggcgctgtgcgccctggcagtgggagtctatctggcggccatgggatgcggggggatacgaagcgcggccgtccagtgtatgtccaaggcacattacatggcggaggaactcggaaagatcggttatgagaccgtaaataaaggagaattcttccatgagtttgttacctcttcaaaagtgcctgcagcccaggcgctggagaagcttgaaaaggaagggatcctcggcgggtatccgcttgcggacggcaccattctctggtgctgcacggagatgaacacgaaagaagaaattgacaaggtgatccatattcttaaaggaggtgcggtagatgctgatatttgaaaaaagcagatccggaagaggaatgcatatgctccccgagtgcgacgtgccagccgtgatgccggaggcaaaggatatgcgtgagtctgcgctgcatctgccggagatgtcggaaaatgacctgagcagacattatacggagctggcgaaaaagtcgcacggtgtcaacgacggcttctatccgcttggttcctgtacgatgaagtacaatccgaagatcaacaatgacatggcagatctgccggggttcacagaggtccatccgctgcagccggaacatacggtgcagggatgcctggaggttatcggcacgatcgagaagtatttgtgtgagatcacgaggatggatcgtatgacgatgcagccggcagcaggctcacacggagaatttacggggcttttgctcataaaagcgtatcatgagagccggggagacacaaagcgcacgaagatcatcgtgccggactctgcccacgggaccaatccggcaagcgcggcgatggccgggtattctgtagtgagtgttccgtccggtccggacggatgtgtagatattgagaagcttaaggaggcagccggcgatgatgtggccgggctcatgctgacgaacccgaacacagtaggtctttttgacaaaaacattcttgagatcacagagatcattcatcagtgcgggggtctgaattactatgacggcgcaaacctgaacgcggtcatggggatcgtaaggcctggcgatatgggattcgacgtcattcatctgaatctgcacaagacgttctccaccccgcacggaggcgggggcccgggaagcggtccggtaggatgcaagcaattcctttcaccgttccttccgtccgttctcgtggaaggagaggatgaactgacctttgtgagacccaagcagagtatcggtgagatgaagagcttctatggcaatttcctcgtagtcgtacgcgcgctttcctacatcatgacacttggaaaagaaggcattcccgaggccagccggaacgcagtgctgaatgcgaactatatgatgaataagctgaaggatctgtacacgatggcatacgatgaagtgtgcatgcacgagttcgtcatgagccttgaggatctgaaaaagaagacgggcgtgtcggcgatggacattgccaaggggctgcttgacaacgggatccatccgcctaccatgtacttcccgctcattgtaaaggaggcgctcatggcagagccgacggagacagagtcaaaagagacgctggacgaagcgatcgcggtgttccgcagcctttatcatgaggcgcaggaacatgcagagagcctgcacagcgctccggtcaagacacctgtgacgcggctcgacgaagtgggagctgcgaggcatccggttctccgttatcagtttgagccataggaagagagagtatctgtatgatagaaaagatcacttacatagagagcagtcagacagacccgaggaaaaatctggcggtggaagaacagcttttgctgacttgcggcgcagatgaatgtatcctgtatctctggcagaaccggcacactgtcgtgatcggacgtaaccagaatgcatggaaggaatgcctcgtcgacagacttaaggaggacggcggatatctcgtgcgccgtccgtccggcggcggagcggtataccacgacctggggaacctgaattttacctttctcgtgcagaaagaaaactatgatctggacagacagcttgaagttatcataagggccgtgaaaaggctcggcatagaggcagaaaagtctggccggaacgatattctggccggaggaaagaagttctcgggaaatgcattttatgagcagggttcccgctgttatcaccacggcactttgatggcggacgtcaatatcggggaattgtcgaagtatctgaccgtatcgaaagagaagcttaagtcaaagggtgtggattccgtaaaatcaagggtcgccaacctgaaagaattctgtcaggatctgacggtcgccggtctgaaagaagctcttgtggcagcgtttgaggaggtgtacggacagaaggcggggacgaggagcgtggaggaacttgaccaggaggaacttgccgggcttgagaaaaaatacagctcatgggagtggacatttggccggaagacggattttacatatgaactgtcccaccggttttcgtggggaacggtgacgctgcagcttcaggtaaagggcggcaggatcgaagatgcagccgcctggtccgactgtatgaagccgcaggtgatcctcgaccttccgcggtatctgaaagggctttactacagacgtgaggcagtgctgccgcagctggggctgttctggtccgaagacgcagaggaagagcagatgatgaaagatatgatatcgtggctttcagaagtggaattttaaaaggagacataatgatatggaacatacatttgatctgatcgtgatcggagctggcccgggcggatacgtggccgctgtgaaggcggcaaagctcggacttaaaaccgcggtgatcgaagctgggcgggcaggagggacatgcctggaccggggatgcatcccggccaaggcgatgatccacgcctcctccttgtatcaggaggtgatgtcaggcggacggttcggggtgtctgcctcagacgtcacgtacgattataaaaagatcctctcgtataaagaggagacgacggagcagctctgccagggggtggaacagctgctgaaggcaaataaggtagagttgataaatggaaaaggcgtcctcacaaaggagcgcagcgtcaaggtgacggctgacggaaaagagaccgtatatgaggcggagcatgtcatactggcagcgggggccaggcctttgatgccgccgataccaggcctttcgctgccgggcgtgctgacaagtgacgatgtattcaggctcgaggcggtgccggacagtctgctcatcatcggcggcggggtcatcagcgtcgagtttgccactgtgtatcaggcgctgggatgcagggtcactatcgtggaggcaatgccgcggctcgttccgaatatggataaagagatctcccagaatctgaaaatgatcatgaaaaagcgcggtgtggacattcacacaggcgcctcggtgaaggccgtcgagcaggacggagaacagctcgcctgtctgtttgaagaaaagggaaaggaatataagatatcatccggctatgtgctctgtgcggtgggccgggctccgaatacagacggacttctggaggaaggaaccggtattcggctggaaaaaggccgtatcgccgtagacagccggttcaggacagacatggaaggcgtctatgcgatcggggatctgatcaaggggacacagcttgcgcacgcggccagcgcgcagggaatgtatgtggccgaagtgatcgccggcgcagaaccgtcggtagttctggatgtcataccgggctgtgtgtacacgaacccggagatcgcctccgtcggtatgtcggaggaagaggcaaaagagaatggaatagaagtaaaaacaggcaaattcattatgagcgccaacggaaagtcgctcatcacgaaagaggagcggggctttgtgaaagttgtcgcagaggagcagaccggcattgtgctcggcgcgcagatgatgtgcgcgagggcgacggatatgatcggagaatttacgacagcaattgccaatgagctcacggtggaacagatgctccgcgcggtgcgcgcccatccgacttacaacgaaggcgtgggggaagcgctggaggaagtatttggggaagccattcatgtagtgccgcggcggcggtaagtaaagccggaacggatgccgggaagggcagctgtctggcaaagcagtcaggaaaggaaaatacatcggctggaagatgtaagggttgaaaaatgggatttaaaagtgatatagagattgcccagggagcagagatgaaggtgatcaacgatattgcctcttctatcggaattccggacaggtatgtggagaattacggaaaatataaggcgaagatcgactatcgttattacacagatgaactggcagagcgcccggacgcaaaactgatcctcgtcaccgcgatcaatccgactcccgcgggggaagggaagacgacaacgaccatcggcgtggcagacgccatgaaccgcctcggcaaaaagacgatggtagctttaagagaaccgtctcttggccctgtatttggggtaaaaggcggagcggcaggcggcggttatgcccaggtcgtgccgatggaagatatcaatcttcatttcacaggagacctgcacgcgatcggggctgccaataatctgatcgccgctatgctggataaccatatccatcagggcaatgcgcttgatatcgacacgaacaaggttacgtggcggcggtgtgtggatatgaatgaccgccagctccgcagtattgtggacggtctcggatcaaaggcggacggggtgacgaggcaggatggttttgatatcacggtagcctctgagatcatggcagtgttctgtcttgcaaaagacatcacggacttgaaagagcgggtgtccagaatcatcgtggcatattccaggagcggaaagccagtgacagccggggacctgaacgcgcagggggccgtcgcggctcttttgaaggacgccctgaagccgaatctcgtacagacgctggaagggacgcctgcgtttatccacgggggaccgtttgcgaatattgcccatggctgcaacagtgtgatcgcgacgaggatgggcatgaaactggcggactatatggtgacggaagccggctttggcgcagatctgggcgctgaaaagttcgtggacatcaaatgcaggatgtccgggcttcgcccgaacgccgtcatcttagttgccacaataaaggcattgaaatataacggcggcgtggcgaaagctgatctgcaggatgaaaatctggaggcgcttgaaaagggactgccgaatctgttaaagcacatagaaaatattacaaaagtatatggattgcctgccgttgtggcgatcaacaaattcccggcagacacagaggccgaacttgacctcgtgcgggaaaaatgcagagagctcggggtaaatgtggcgctctccgacgtatgggcagagggcggcgcgggaggccgggaactggccggggaagtgatccgtctctgtgagggagaaagtacaatggagttcgtatatgatacagatgcgggcgtgcaggaaaaaatagaagccattgccgggaaagtatacggcgcggacggagtggattatacgccgaaggcgctcaaagagataaagaatctggagagtatcggacttggcgggcttccgatctgcatggcgaaaaatcaatactccctgaccgatgatccaaagaaacttggacggccggaaggattcaggatcacgatccgcgatgttgccgcctctgcaggcgccggtttcctcgtcgctctgacgggcgatatcatgaagatgcctggcctgccgaaagtgccgtccgcagagaagatagatgtggatgaaaacggtgtgatatccggattgttttaaggaggggatgataagtttgatgctggaaatgaagacaactgaatttctcgaagcactgtcatcttccgaaccggtgccgggcggaggcggggcatccgccgccgcgggcgccatgggtgcggcgctcggaatgatggttgcgaaccttacggtcggaaagaaaaaatatgcggacgtagaagcggaggtcatcgaagtcagagaaaagctcagggcatacagggaacgtcttgcggaattgaccgaccgggacgccgaagcctttgagccgctctccagagcctatggactgccaaaagacacgccggaacagagggaagagaaggcaggagtgcttgagcaggcgctctatgaagccagtgtcgtgccgcttgagatcatggaaacggtgctgcgcgttatggaactgctggaggcgctaggcgagaagggcagccgtatcgccataagtgacgttggggttggcattttatttgccggggcagctctggaaggagcctctttgaatgttttcatcaacacaaagctgatgaaagatgagaagcgggcggcagaactaaacggcgaggccgaccgcatgatccgcgaaggaaggcttctgaaggagaaagtatacggcggcgtgctggatcacatccgctagaagcaggaggaagggatatggacacattgatgaaaggcgccgatgttgcggccgctatgaaagaaggcctgataaaggaaacagaggctctgaaggaaaaagggatccatccgtgcctcggtattgtacgtgtcggggaaagaccggatgatatggcttacgagcggggggccagaaagagaatggagagtatcgggatcagatgtgaagtgacggaactcccggaagacattacccaggaggcctttgaggaggcatttcgcggcgtgaatgacgatccgcgcatacacggtatcctgctgtttcgtccgcttccgccccaccttgacgaagagccggtcagggcgatgatccacccgctcaaagacgcagactgtatgagtccggtgaatattgcgaaagtgttctcaggggacgagagcggatatgcgccgtgtacaccggaagctgtcatggaaatgctcgatcattataagataagcctcaaaggaaaaagagtgacagtcatcggaaggagcatggtcgttgggaaaccgctgtccatgctgctgctgaaaagacatgccacggtcacggtgtgccacacaagaacagtagaactgtcaaagacgtgcagggacgcgcagattcttgtcgcagccgcgggaaaggcgagaatggtcaccggagatatggtcggcgacggcgcggtcgtggtagatgtggggatcaatgtagacgaagagggaaatctgtgcggtgatgtggactttgacagtgtacaggagaaggcatctcatatcagtcccgttccgagaggcgtcggcagtgtgacatcctccgtgctggcgaagcatgtcataaaaggcgcgcgctgtctgaatgaaggctgttaggatacgttcgggaaacgggtgaaaatatgaagcgctacattaaaatattttttcttgcggcaggggccggactttttatcggagtcgggggaatcgtctatctgtccatggaaaataaaacagcaggttctctgctgtttacggttggattatatgcggtcgtgctcaacggtctctatctctataccggaaaagtaggatatattgtcaatgaagctcataaaagggcgtacggcatgctgctccttgtcacctgggcagggaatctggcaggggcggcgctggcggcgcgggccgtgctcctgtcacggatagatggaatccgggaagcggccgccggcgtctgcaggatcaagctgaacgaccggccggtcagtattctgatcctctcttttttctgcggccttctcatgtttatcgccgtagacggattcagggagaagggaaacccgctgatcttatttctctgtgtcagtgtgtttatcctctgtggttttgagcactgtgtggcaaatatgttttattttacgctggcagaggcatggtctgtaaaagcggcgggttatctgctcatcatgaccttgggcaacagtcttggcgggatgcttgtcccggcggtaaagagactggaagtaaaggtacttatctgagcagcgggaggtttcccgtcagtttgttcactgctttttttccgccgcatattccaataccgtaataaataaattcgtccgagtctgccgccttttggatgaattcattatatacgttacagctctgtgccacatctgagaagtcgacgactgtcaagtctgagaattcgggggcgtagagctgttctcttatttctttgatcttttccctggaagccttgagtatcggcaccggtacggcaatgataccgaggtggaccctgccgtttttgtccgtcacgtcgggtcccacggcttcggggatatgctttcccaaagtgatgcccatgataccggcggtgtttgccgcgataccggccggaagcgcttcgtctattaccatcacacatttctgatcttgcagttccattgtttctttcctttctttgctgctgttatcgttgcttttgattttaatcgaatcggcggaaagattcttgtaagatatgacactcaatgcagggaagttttatttcatggggcagacaggttgacactttgtgaatatgatgataagatgcaagtgaatacttgcatgaaaagcggaagggagtggtatataggttggacgaaactcaaaataagatcatcactgctgccatgaccttaattatggagcggggctacactgctacgacgacgaaggacatagctgcggaggcaggggtgaatgaatgtacgattttccgcaggtttaaggggaagaaagagatcgtgctgtcggcgatggagctgccggagtggaatccatgtctgtcggaggaagacttttcatacagcggcgatgttgtaagagaccttatatcgttttcagaagtctatatgagcaaagtgactccccgcatggtgaaagtgtcaatcggcctgcgcacgccggaactgtatccatatacgtccgattctatactggaagttccccgtgtatttaaaaaagtgctgacagcgtattttgacaaaatgatccgcgggggaaagatcagggacggggatcgtgagagtctggctatgatgttcctgtctttgaattttggatttgtatttttaagcgcttcatttggggagaaactgactcatatagaaaaagagaagtatatctgtaacagcgtgggcatttttgccgaaggaatattaaaaaagtaatggtatctccggtatctcaggtataactgggggtaccattatttataatattgatgcaagtgattacttgcatgaaaggaggagtcatggtatattttattgctgcggtatatattgatgaagaaaaagggcggggtgattacgacgagtatatccgggaggtcagaccgatcgtggagcagtacgggggaaggtacatcgtgcgttcggataaaataacgcctctctgtgagaagtggaggccagggcgccttatcgtgatcgagtgggatacaaaagaacgtctggataaatgtttccagtccggggagtattgtaaaattgcgtcaaagagagaaggttctgttgacagcagggcagtcatagtggagggataacgtatggagatatgtaacaatgttcaccagatcagaattaattttaatgtgaccgataagatagaacggtatgtctatatttatctcataaccggcaggcggtgttaccttatagataccggaactgccggctgtgaggcaaagatcgggcggtatatggaagggatcgggagaagactggaggaagttgcggcagtgttcctgacacacgcacatcctgaccatatcggcagcgcggccgccttaaagcggatcacaggctgtaaggtatatgcgcctgagaaggagaaagcatggatagagaatatagacttgcagtttaaggaaaggccgatcccgaatttctatgcgctggctggagagtctgtgtctgtggatgaggcggcttggcaaggacatattatttcgccggagccggatgtgacattacgggcagttgagacgccgggacacagcgcgggctcggtctcttatgtatttgaagaggagcaggtgatctttacaggagatacagtaccggcgccggatgatctgccgatcatcacagacgtacgggagagcatacagtcgattcaaaagctgcggacgcaggagcatatccaatacctctgccccgcatgggacagagtatatgaaggaagagagacgaaaaaagtgcttgaccgcagcggggaacttctggacagattgagacagtgtgtcatacagacgcagaagcggtacccgggaaggacggctgcggagaaaacagagcttatcaaggcggacatgggatgggggcacctggattctaatccgttatttgccgcaagtataaaagcttgtattgaatagcgtgcgcctggcaggtataataggtctatgccgacgcgcggatgaagcgcgcgaaaagtaaggaggaacgatggattattattttgcccccatggaggggatcaccggatatatacaccgcagtgcgtaccaggcgttgtttccgtgcatagacaagtattttactgcattcattgcgccgaaccagcatggaaagctcagttccagggagaagaatgatatacttccggaacacaacagaggaataaaggtagttccccagcttctcacgaacaaggcagatgattttatcctgacggcagggaaattaaaagagtatggctaccgtgaagtgaacctgaaccttggctgtccgtccaggactgtggtatccaagtacaggggatcagggtttctggccagaccggaagaactggaccgctttctgtacgaagtgtttgaaaagacagagacagacatatcggtaaaaacaagaacaggaagggacagcccccaggagttcgtaaggctgatggagatctataacaaatatccactgaaagagcttatcatccatccgagaacgcagcaggatttctacaaaaatacgccggatctgagtgtatttgcacaggccctgtcagtgagcagatgcccggtatgttataatggggatatatttacgacagaggacttaaaggtatttcgcgcgcggtttgggaatgtagataaagtgatgctcgggagagggctgctcgtgaatccgatgctgatagagatggcagaggatggaaccgccattgacatggaaaggataaggaaatttcacgacatggtgtacggcggttacagggaggtgctttccggggataaggtcatcctgtttaagatgaaagagctctggagttatatgatccatctcttttcagacagtaagaaatacgcaaagaagatacggaagtcggagaagctcccggcctatgaagaggcggtagacgccctgtttttggagtgtccggtgagagagccggagaggaatgcacaaacttaggagagatcaagaaggagctggtaatacatttgatctgcaatatagcggcagcggccgcgggagccgctgcattctgcatgatagcgggatactgttccccgggaaacggccggggaagcagaccgctttgcacatggatattccgggggacgggcggcatcactgcactgtactgcctgcaccggtatgaggaggccggcgcatgtcttaccatgttcggtttcttttgcatactggcagcagtgacacttacagatttgggccgacgggagattccggatatgtactgtgcggctgttgtcatactggcgtttatatcggccttcacgctgccaggtctgacggtatgggaaagggcggccgggagcctgtgtgtcagcctgccgtttcttgttattgccgtagccgtgccgggggcatttggcggaggggacgtgaagctgatggccgcctgcggcctgtttcttggagttaagatcacagccgtggcggcagcggccggcatactgctggcaggatgcgcgggagcaggtcttgtattgtccggccgcagaggaaaaaggggagtccttgcactggggccttttctctgtgcaggaatgacggcgggggtcatttggggagagcagatgatacaatggtatatttcttagaaaatattactatttattgagcctttttccagtccggaactgtcttcatattgtagagtataatcgttaagtttagatatacagtaacataaggagcgtaacagtttatgaaaagattaaagagatggcttgctctcgttctggcagtcgccctgctgggagccaatgtagtatattccatgggcagtgaacttaaggcgaacgagatagagcaggagcagcaggcagcacagccggagaatacgggcggacaagaacagcagacatttacttcagacggcgtgagcgtggaggtgacagactccgggacagagacggcagagcagacggaagagcccgccagccggcagtccgcgcagctgcagcagactccgcaggagccggaaccggtacagccggagaacacggatccggccggcggtgaaaataatacggctgatgcagtccggtacaaggtgaccgtcaaggcgtccggcggcggtttcggaaaagtggaagtaacaaacaaaggagtgccggcagaatcagacctgagccgggattatgagatacaggcagatgaggcgtcttccgtaagtctgacggtcacgccggaggaaggctatacggtggagacggtgaaggccaacggaaccgcgctggcagcgtccggcacggaagggaaagcatctgtatatgagatcactgagatagcggaagataaggtgatcgagatctcctttgcggcggaagctccggcggtaagtccgatgagcttgtccgccgaagacagggctttagaagcgccgtccggaaattatacggtcacgtataaagttgcgggccagttccagaacgcgtacgtgctcacgaagggcagcgacgggaaatcatatacgacagatgcgataagctgtgagaagagactgacttcctttggagtctggctcaaaacaaagtcgggcacagttgtgatgccggtcacgatgacgctggccaatgacgtgacaggaactgatatggacggcaatccggtcagatatacacggggaacagtgatatcgaagctggacggcaaaaatgccaaggtagtcatgccatacagccatacttattttaaggcggattctaatattcagatagaagtgacaccggcagaagaagccacatataacgtgacatatcatgtggcggacggatacagggatgagtacacgcttaccggaaacggcgcgtcagggctggactttacaaaatattctcagtggtgcagcagccgtttcacttctttcggcgtatggctgaaagcggggaagagccaggtgatgccggtttcaatgactttattgagtgaggcgcacggtacagatgacagagggaacccggtaacttttgcaaaggggagcgtgatctcggagttaagagagagcagtaatggccaggttggcgcctatgtgacgaacggatttaattttgcatattttgagccagacgctgacattcacattcaggtggaaccggcgctgtttaaagtccacacgcagcattttctggagcagctggacggaaattacaagcttgagagtgatgtggaaggggaagtgtatgctccgggcacagaggtgaaggcagaacaggcagaatatacagggtttacttacagcccggacgccgaaggtacggttgcaaaaggtacggtgaccggtttgaaaagcctcgtactgaagctatactataaaaggaacgttcacgaagtgacttatgagatcgacggaaaagaagacgcagtgaaagagacgtacaaatatggccagaatgtcagtctcagggcagtgcctgcaaaggcggggtatgattttgacggatggaatgtaaaacaggactttgccatgccggacgaagatgttgtcatatatggtggttttgtggccagaggcgacacgccttacagggtagagcattataaagaaggactggacggcagatatacgctggaagacagcgatattgagcacaagaccggcgggaccgatacagagacgacagcagtgcccgctgattttgaaggatttacctataatccagacgcaggggacagcaagacgacaggaacgatcagcgcagaggacgaacttgtattaaagctgtactatgaccggaacagctataaggtcatctatcagcagccggacggacagcgtatcggtgagccggatacgtatctgtacggggaagagacgggagacctcaaagaagctccggcaaagaccgggtacacgttcgggggctggaacaccgacgcgcttcccgctttgatgcccgccggggacgttatcgtggagggaagttacagtatcaacagttactccgttacgtatgtggttgacggcgagatatacagccagcctgaactgtatgaatatggcagcaccgtcatcccggtgccggaaccgctcaggaggggcagcagtttcagcggatgggaccgtcctttcaactttaagatgcctgcggaaaatattgtgatcgaaggtacatttaaggtcaacgattacaactataaaattcagtattattacggaaatatcctggatgaatcgcagagtataacagatcaggccgaatacggcactaccgttgcggcgcctgcgccggagactgttgtatatgagggccggggctataaactgccggacggcggtgtgtatgagatccaggtcagtgatgaaccggaggaaaacgttatcaatgtgacatatgagacggacagcgcaagtacggaggcatcttcaacggcggggccggcttcaccttcagctccggcttcggataacggggctgtgacgcctgccggtgtcatacagacgatctttgaaccggtcacagcgctggcggaaaaggtggcagaccgggttgaggattaccagaagacagtccagagtgcggatgaggatgtcccgctggcaaacggtgagacgccgccggtacagagtcagtgcatcctgcatttccttatccttcttgccgcgtttgctatagagcttttctatatcagaaacagaaagagagagcagctgagatactacgcgggacagggtatgtcagcgaaggcagaacaggacgattaaacgtattataaatgacggacagggacggataatgtgtgacgcattgccgtccctgctttctactccaaaagaatgttccggataaaagagcagggcagtttaagtaatgatactgaaattaagtgaatcagaagtataagtatgatataataattacttgaaataaaaatgcaaggggacttttacatgaaagaaaataaaataagaaaacggcttgtcctgtttatgaccgccgctgctgtaatgtcctttattgtcgttatggtgcttgcctgccgttcgggaaggggagacagcgcacgttacgaaaaagccgaaaggcgttatatggacaaaggcgtgagcgttcttcaagaagacgggagagaggaagtgaaagagtacccctgccgttcggacggaaaagaaggatatttttattataaactgccggaggatatagaggataatgcggtgctcgtactgccgaatgtgtatcagaaaatagaagtgacgcttaacggaaagcttctttatacatatggcatggatcaagattcgccttattatatggaggcacgtctcaactgtgcggtcagactgcctgacggatccggcggccgggaattggagatacatcttgtgaatacggagaaaatggggaaggcgtcgctgcagcagggatatctcacaacagcgggggaactgtcggacagcttactggccgataatttatgggcctttttattctgtgtgctgactgctatgacaggaatgtgtattttggccgtttcgctttggcagtatataggaaaggcaggcgatctgtccaggatctttttctgcctcgggcagtttgtccttctgtcggctgtgtgggtatttaccgattcaggcctgccccagcttatatttaataacagccaggggctgatggtactgtcctttgaagtgtttatgctcatgcccgtgcctctgcttcagtttgtacagcttgtgtgcgagtacagccgcagggcgctgcgtgtactggtgacaggttacattgtgaacttctttttgcagaatgcggcatatgcacttaagctttctgattttaagaagatggtatatctgacccatatagtaatggtcgccagcatcacagcgatcatatattttatattaaaagaggcgagaaacagacattccatgtatgcgaaatgggtgctggcaggagtcggcatatttgcaggtttttcctgtatgtctcttgtgagttattatgtgactggaggcattcagaacgaaaagttttttataacaggcttctttatttttctcgctgttctcatcatacttgccacactcaaatttcaggagttttctaaagagtctgcccgggcagcggtgctgaaagaactggcttacaaagatatgatgacggggatcgggaaccgcaccctgtacgaagagcatatagcggcatatgaaagcgcaccgcggccagaagccgctgttgtcattattctggatatcaacaatctgaaggatgtgaacgaccggtttgggcacagggcgggagatgagctgctcatattggcagcccggtgtctcagagaagctttcgggatccggggaacgtactaccgaatcggaggagacgagtttgccgttattctgaaagaggcagatgccggggaggaagaatgccgcagactgctggggaggtgtattgagaagaacaatgccggccgggagatcagactgtcggtctccatgggctatgccgcaccagacgcgggaaagggtgcggcgcatatacgggaacttatagagaaggcagatgccaggatgtacgaagagaagagacggtatcatgccggccggtagttcttaccgggagttgtcgggaaagactgtgatctcaaagctgttgcggtcgccccggtatctggccagggaatactcgatcggtttgccgtaggcattatagccggttgaggtaaagaactggataggcttgcccttttttatgtcaagatattgttcatcccgggagtcagcctccacagcttccactattctgttaacacggaagacactcgtctctttccgttcgttcaggatgctgtacagacgttctttttccaggtcatgggacagtataaaactgcagtcatcgtacggcaggaaggtctctatcgtgacgatcggttcatcattggccagtctcttgcggtgaaggtaaatgacagaatcttttcctttcagctcaagacttgcggcggcttttgcgcccgccttctgtacctcaagtttcagcacctctgtgctgggagtcatgccggccctcaggatctggtcgttaaagctctccagctttttaataaagtcctggcttattttgggctgggagacaaaggtgcccttgcttttgatccggtaaagccatccttcctgaacgagttcagtgacggcctgccggactgttgtgcggctgatctggaatgtatcgctcagctccttttccgtcgggatcagactgcccactttatacgtgccgtttcggatctcttccatgatcagtttcttcagctggaagtacagggggacaggtgtggatttgtcaattttggatgcattagtcaacatatgaaaactcctatctgatttattatcataaatgtaattatgttatatcattatgatatcatttgaaatgcaggaggtcaagaaaataaaacagtatccgccgaaaggaattggcaaggtgaaatagaatgcaaatatgcgttgccttttggaagaaaatagaataatataaaagagtaaggttgagttagagaaaggatatcaaatatgaatcagttttcaaaagagagtatcgataaaaacacaccggtgccgatgtactaccagttaaagaaaataatactggatatgataagggagggcaaactgaaaccgggcgatatgattcctacagaactggagcttagcgatatatttggaatcagcaggacaacaaccaggcaggcgattatggaactggtaatggaagggcagctttaccgtattaagagtaagggtactttcgttgctgaaaaaagagtgatacaggattttacaaatgttatccgggcttcccataatttactgcagtcacagaatgtcaaaacgactacaaaggtgctggagctgtcggtcataaaggcaaacgaccttgtgagcaggatgcttcagcagagagaaggagaagatgtgatacatctgcgcagactccgttttgtgaacgatgagccgaatgttctggcagatgcgtatctccctatgtgctgcagggacatgctggacagagatatgaataagacgggtttgtatgagtttctcgatcaaagtgcagagacgacgccggtcaaagcggtcagggagctggaagccatctctgcggaggaaagtgaggcggaactgctcggaatcaaggagggcgacccgatccagctgacgacatctgtaacttatacaaaagaagggaaaccgatcgagtattctattgccagattcaggggtgaccggaatgtgttccgctgtgaagtgaatatatagttgtatggaaaaaggaaattcagatgaatttcctttacaaaatactgtatatgttatatcattacgatataatgatgaattgctatatggacaaattaaatggaggtaagatatgggtgagataaagctggacggcctggctcacataggtctgtatgtcaataatattgagaggacgctggagttttacatggagaaactggattttgaactgatccacgaagcagtaaatgagattccggaaggagaagtccttgttaaatttattcagaatggttcgtgcatgctggaacttgtacagtttccatatactataaaaagggaagatggatggtttgaccacatttccatagcagtacatgatctggacaaggtgatggagcatttaagacagaaggggatcatatttgaggaaggcagttatacagaggctttgaatgtcttcccgccgaaaggctccagatgggtcttcttcagaggccctgacggggagcatatcgagttgaatgaaagaatgtgatatggtaaaaatgcacaaaatgtaaaaaacatataaaaacatatagttcacaattgacaaaatggttaaatagaaatataatatgtcataacaatactatatagtaacgtcatcattttaacgaaacggaagatcaaaaggaggaaaaactatgaaattgaaaaaagtgttgtcagtggtactggcaagtattatggttctcggtctggctgcctgtgggaacaaggagtcggcagattctgaaaaagaagggggtaaagataaagaagagtatgacatcgtctacctgtctccatctacagaatcagagtattggcagtatgcggagatcggtatgaggaacgcgatcgctgatatagaaaaaaaggaaggcattaagatcaatttctcggtgagcggtcctgcctccgaatcagagacagacgcctatataaaagcatatgaaagtgtcattgcttcctcacctgatgccattattacagcgacactggctccggacggcacagttccaaagacgcaggaagccaaggatgcgggaatctatgtcaactttgtgagtatggggcttgaaggaggcgattccaacgattatggagattattacggcgtgcattattactgtgacaatacgaccatcggggaaactgccgcccagtctatgctggatggcctggaagcaaacaatatagagccaaagggcaagatcggcatgcacatgtccgttgtcgtagagacactggaagagcggatggacggatttaaagcttatatggcagaacacgcgcctgacatcgaatgtcttgatacactctacaatgaaaatgatgtcaacaatgcacagtcaaatgtggagacacagatctctacatacggggatgaactgatcggactttacggtggaaacaatgtgtcaggcgacggcattgcactcggacttaaaaatgcaggaagcggaaacaagatcctcggtatcggcgtggactccgacagcctggagatcgaggcgctggaggcaggaaatctttacgctattattgttcagacaccatatgaccagggatataaggcggttgagaatgcggtggaatacttacagaccggtgagaactctgagagtgaaaagcatatcaactgtccgtcacaggcggttacaaaagagaacatggacactgaggagagcaaggctttactcgatccgacgatactcaaaaaatagagacaaaaagtgtatcaggccgccgtcatctgtgcggcggcctgagtgtacaggaaagaatggtggcgcatatggaagaagatattattttaaaagtagacaatatcagcaaatcatatccgggtgttaaggcgctccagaatatcagtctggcggtcaggaaaggtgaagtcagagctctgctcggtgagaacggggccggaaaatccacgttgatcaaatgtatcatgggggtagagaagccggaggaaggtacggtgagcatcaactgcggcggttcatggaagacacctcagagtgtggctgaaagcaaggagtgtggaatgcatgccaattatcagcatgtcaatatagcaagagagttgagcattgcggaaaattactttcttgggagactgccggtaacaaaacttaagactgtagactggaatctgatgaacgaagagagccggaagatcattgacaaatttgagatgaatgtagatcccggggccaagatcagcgagctttcggttgcaatgcaggaaatggtcactatcagtaagatatcagtcaatgacaacataagactcgtgatctttgatgagccgacagctttactggagaatgataaagttgagattctgtacaggtatatcagagagctgaaagagaggggggtaagcgttatctatatctcccaccgtctggaagagctgatggatatctgtgacacagtgacggtcctgaaggacggacagtacgtggatacgaagaagatcagtgaagtggacaaggacatgctcgtatctctcatggtgggccgtgaggtaggcagcctttataacatcagacacagaaaggcaggagcagaactgctgagggtggaggaactgacatcaaaaggccggtttgagcatattgactttcagctgcatgaaggggagatcctcgggtttgcaggactcgtcggtgccggaagaagtgagataatgcgcgccgtctttggagtggacgcggcagacaacggcgatatatacatacggggtgagaaagtaaacattaagaatccgcaggatgccatacaaaagggcatcggatttctgacagaggaccgccgtctcgatggactggcgctgcctctgagtgtaaaggtaaatacgaatatgtattcttacgatctgatcagcagagcaggagtgatcaaccgaaagaaggaagcagagagagcagaggaatacaagactaaaataggagtaaaaacaccggatattgagcagtcggcggaaaacttatccggaggaaaccagcagaaggtcgtgatcgccaagctgctgtgcagggatccggatatcctcatattcgatgaaccgacggtaggcgtcgatgtgggcgcaaagcaggagatatacaagatcatggaactgcttgcggcacaggggaagggaattattttgatatcgtcctatctgccggaggttatgggactttccgacagaatgatcgtcatgtcggaaggaagaatatcaggtgtattagatagaaatgagatcgaagttaccacagaagaagatgtgctgcgtctggcgtcggcagtaatataaacatggagttcggagggatcatatgaatagagtaaagacaggaaaagcaggaacgctgcttaggcgtacagagttttctctggttatcataattgtcgtcatatttctggtggcggcattcgggacagacaatttcctgaccaattataatctgaccaatattttaaaacaatgttccattataggagtcatctccatatccgccacatttatcataattacgggcggtattgatctaagctgcggggccatctgcggcatgagcacactgatcgtcgccatgggacaggcgaaatggggaatgacggtatctgtctccatccttcttgcattggcggtgtctgtcatctgcggactttataacgcggtgatcatcaatgaatttaaggtgcctccttttatcgcgacgcttgggagcatgacaattctgcgcgggcttgtcaaggtgatcagtaatgccagcacgatcgccgggttagacaagaagttcggtgaatttgccagtgagtcggttgcgtttattccaaaactggccgtcatatgggtgatcgtcgtgctgcttggattctttattctgcattccacgacattcggcagaaatctgtatgttcttggcagcgggcaggaagtggcgaggctgtgcggtatttccatcagacgcgttacatatatgacttacggtattgcaggttttttgtgcggcgttgccggtgttatgctggcatccaggatcaacagcgctgtaccgacggcggggaccggttatgagatgaacgcgatagcagcgtcggtaataggcggcgcgtccctgtcaggggcaaaaggctctgtatggggaacagcccttgggacgatccttatgacgttgatcgataatgcagggattcagttcggaatcaattcgttcattatggaaatcagcacaggcgtgcttatcacgatcgcggttatcatcgatcagatgaaaaataagaaaaccgccagatgacaggaggaacaggagacatgtttgattttagtacagtacaggataaaaaaatcgcagacagggtatttgcggaggcgaaagagtttctgtcgttgtgtcactttgggctgcagggcattacgaggaccgaggacgatgtgatcaagatagtggagaagctgaaggagacacgaatggcgccgctggcttttgacacggagatgcagtttgtacctttggtgcgggagctgttctctgactactgctgtaaggtgcgtctgcactgcgcagtgtcctatcctatgggacggcttgtttctgattccaagatgcatgcgctggacaggctcaggactatggaggtggacgatgtatgtgtatgtctcgactggcaggcgattttttcagggagatacaaggatgtggagaaagaggcggcccggatcgtagatgagtttcaggatgatttttacagagttgcacttgtcataccggccacgctcatgagcgatacacagatcatagagacatgccgggcgctggacgaagccggaacagtgtccgtgaaagtaaatccgggagccgcgcttggcgtgtcgtttgaggaagtggcattgataaagcgtatgttcccgaatcggtttgacattcacccgtccggaaatatacggacactatccgacgtactccgttacagagaaatggggtgcaacaatatacataccgcggcagcgcttgagatcacggacgattttattgtgaaaaaattaaaagaatatggagggatatagacatgaaaatcattttgacaaatataccgaactattctgtatcagatgaaaactgtgagaacctttattacagggcgatcgacaataaggcggatgcggttctcataggtccctccagtatgaagacaggggagaggttcaaaggcagaggagtgaagaccgcagtgagtatatcttatccttcgggcacagcttttccggatctgaaggcgcaggagatcctcgactgtgagaagttaagcggcgtggctgatatgtattttgtgacggcggcagcgggatattatatgagcggacatgaggataacttgagagaagagatgcgcctctgcgtggaggccgcgaagaaaccggtatactttatcacagaagccgcggagatgacagatgaatgtctggaaaagatgtgcaggatcgcctgtgaagagcatgtaaaagggatcgtgacatccacggcgttcatgccgtatgacataaagagagccggggccgcggatgtatcaaggcttaaggcgtacggtgcggaccaactggagacagtggcattcggaccattctgtgcgggagaggatgtggaagagatccaaaaggccggcgcagatatgatgatcctgaatgagtcgtgtgaaataggaaacgtatagagaacggaggcgtgttatatgaaaacatatattatcggagcagacataggtacacagtcgatcaaagtccacctgtatgatgaggaactgaaacttgtcagggcggtatcaaaagaacagtatgtggatacgccgaaaccgatgtggatgacgcagcgggcgtcttcctggtggaagcttctgacggagagtatacagcagcttctttcggacgcgggcatatccggaaaagaggtggcggccttcggctgctgcgcccacatgcacggggccgtaccggtcagattggacggcagtattgtccaggacgatattcagctttacagtgacaaaagaggcggttatctggctgataagatagcagaggagatgacggaagagctttacagtatatccgccaatatgccgacgtcgtcctggcacgggatcaagataaagtggctgaaagaaaatgacccggacgtatatgagaaagcagaaaagttcctgacgccaaaggattttatcaactttaagatgacaggtgagacgtgtactgattattcggaggccgccggtgtttttgcgatggatcaaaagacaggggagtggtccgacagactgctcgcagttctcgggatcgaccgggagaagcttccccgcatccagaaagcgtatgacatcgtcggcaatgtatctgaaaaggcagcagccgagaccggcttaagtacagagactgtggtcatcaccggcggcggggacatgctcagtatgctgtatgtatccggtatgcataaaaaaggtacggtagccgatattaccgggacagggggcattatctgcggttacacggatcagccggtcatggaccgcaggatcatgaatttgagacatgtgctggacgggtgggtcccgttcggaaacattgacgctgccggcgtctccttccgcttcctgcgcgacaatctgtgcaagaaagagcgggatgaggcacgcagtcaggggatcgacgactatgcttatctgtgccggctggcccaaaaggttccggcaggttcttcagggctttatttcctgccgtatctcatgggagaacgtacgatgggaagcgcagattccaggggatgctatatcggaatgtccatggataaggagatcggacattttatccgtgcgcttctggagggcgtggcgctggaatttaaacggacactggatgtatttgaagacagcggcaatacgatccacgcggtctaccacagcggaggcggcgcaaagggtgatctgtggaatcagataaaagctgacatatatgaaaagccgatctataccctccaggcagatgagggcggtgtgcttggcgtgtctcttatggccgcatatgcggttggcatcatcggagacttgatcgaaggggcggatgcggtcgtcaaggtgaagaaagtgtatgaaccagaccgggacaactttactgtatacagagagatgaaagaagtattttcagagcttcatgacacccttcagacgcctttccggcatatggccagagtacaggagaagttcggaaaataaagatcataaagatgtgccaaaaagaaaggaaaggagataatcatggcagattttaatgtagataaacagacctttgactatatcagaggattcacaattgatttagatatgaaaaccggcatgtccgggatgaagaagacttccaggcgttacctgagtcagatgaaaggaatgttttctgacgatgcggcttacgaaaaaaagctggaggaagagggagacgttctcgtatacgaatttcatgagatgggtgtgccggaacatccgggagacctggcttttggctgcagcattacatatccgggcaaagtgggagaggagtattatatgaccaaaggtcacttccatacaatactcgatacagcagaagtatactattgtctcggcggccacggatatatgctcatggaaagtccggagggcgactggctggcccatgagctgacgccgggcaaagcactctatgtaccgaagcgctacgcacacagaagtgtcaacgtagacccggaacaaccgctgcttaccttcttcgtattccgcgccgatgcaggccacgactacggaacgatagagacaaaagggtaccggaaactgctcgtagaaaaagatgggaagcctgccgtgacagataacccgaagtggtcgtaagtgggattttgttggggatgttttaggggattgggggtggacggcggataggccggatgcgcaggggtgtggaagagcgctccggcaggcgggaagccgtaactgaagagcgagccggaagcagacaaccgagcctattcggaatgaaatcctgaagggatttcctccctcagaggctctcgggaatgttatttgtgataacattcccgtgtctgcttccggctcgctcttcagcaacggcttccacacctgcctccgaacgcccttccacacccctgcgcacccggtctctccacctgttcatctccaggctctaaaacattcccaacggagagatttcccaggttgctttaatggggaagtttatttgattaaatccattgtaactacccggaggaatcccacagttggagaaatttgagctttgtgagatgtcaggcaaaggaagggcggcagggggatgcggggcgttggagggagctttgtcaagctgttagggaaaaagccgcggcagggacagaccagaaactgcactacaagtgcagtttctgagacagctgaaataggaaatcatccagatttcctattgaattctgtcggtgtctgttcctgccgcggcttcttcccttacagattgcaagcgtaccgaccgtcccgcagctccctgcgtccttcctttgccgtacactgcaatctccacaaattcctccaacgatcccctccatttataaaacaaaggaacatggtctgtcttccagcatggcgatgagattatctactgccatgtctgccattgcgcgggttgcctcggccgtgtgggctccggtgtgcggggtggcgatcacgtttggaagggtgaagaggggcgtctgtccggggggctcctgctcaaaggcgtccagcccgagcccgccgagccggcctgctttgagagcctggaaagcggcttcttcatcgatgatacctccacgggatgcattgaccagtatggcgcccggcttcacaagagtgagagactgttcgttgatcaggtgatatgtatcgttattcagcggaagatgcagggtgataaagtctgcttcagagagcagtgtgtccagactcgacgggatgatgccgtgtgcctggcagtaatcttcctgtatgtatggatcatatgcgagcacgttcattttaaatcccgcagaacaggaagccactttacggccgatggccccaagtcctacgatgcccagcgttttgccgtacagttccattccggtggcccgtatccagctgccggcagctgtctcgttatggagataagggatatttctcgcgagcgccagcaggagtgcaaaggacagttccgcaacggcctgcgcgttggcgcccggagtgttggctacctttatgccaagcttttttgccgccggcaagtcgacccggtcatagccggcgccatatctggagatggccttcaggcggggacagcattccataacacggccggttatctggtccaggccagccagataaccgtcgcagtctttcagaagcggcagcagttcctgttcggacagaggccggcctgccggattaaaaacaaggtctttgcagaagctgctgagccgggctaaggccggggcgttcttccccggttttaacgatgtcggtgtgacgagtattttcataaacgttatgcctccttctgtacaaggccgaccgcctcttttgtcaaagccctgatcttgtcaaattcatggccgcggatcatggaatcctttaccatccagctgcctccgcaggctatgatttttgagaaggccagatagtctgtgatgttctcagggccgatgcctccggtgggcatgaagctcatgttcgggaaaggagcggacaaggccttgatggttttgagccctccgtactgttcggcagggaagaactttgcgacaggcaggccgtattctacaagaagcataagttctgtaggggtgcagatacccgggaacacagggatattgttatccagcgcaaattctgtcacctgccgtgaaaagccggcggagacgagaaaagaggcgcccgcatccaccgcctgctctgcctgcccggcatttgtaaggctgcctgcgcctacaagcatctgcgggttttgtctggtcataagtctgatggcatcctttgcggcttccgtccggaaagtgatctctgccaccggaagtcctccttcacagagcgcttccgcgagaggcggggcatcggaagcctcatctaatttgatcacaggcacaagcctgtgatgtcggatctgttccataatgttcatattgcatactcctttcttagtcagttgcctttgtcaaatgttagaatgttccggcagtttgtgcaggatatttttttcagctgtgcttctgttattcccttgcttttcagaagggggacaaaagtgtccagtatgtaggtgagtccgatcccttcaggcgtgtaacttttcagccgttctcttgtcgtgtcaagagagaagaggatctggtcctcatatccggccgcaaacatctcggcaaatatctcggcttccctctcgtcgctgtgatatttaaaacgtcctatcgtatcatactcgagatatataccgtgccggcatacttctttgtggacggcaagatcatcctccgcgcggtccatgtggcagaagatgacgcggttaaggggcatctgtcttctgtccaggtatgacataagcttaagcggtgcggcccctcgttctatatgcaccattagaggggctcctgtgcggatggcagcgtcaacggcagcgtcaaataatttcccgtactgcaaaaccaatccgcacgcgtcatatgcgcacttgatgatcccggctttcgcgccgcatgtgcgcctcggacatgtttcatcgcagtctgtgtacattccttccgtaagctcgcgcagaaagagttctgccagcgcctctctgcggatgtcaaagatccagtggccccgcggatagaagatcatcttgtgaaatcccgcggatgcgatgatctgtacgcccgattcctgtccaagccggtacagggcgtctgcgtcccggccgcatccgccgggctgcgcgtccacgatagtggttccgccgcccgtgcggaactgtacgagctctgtaagtgtcttctcatagttgtcgatacagagggctttgttgataagataagaccggccttttgttatcatcagatgttcatggcagtggcagaaacaaagagattccggcggcatccgtcctgtgacggtctggatatacgtcatagtcagctccttatctgctgtggtcattggcgggcgatcatactcaatctgtcaatgagttctgtgtcgatcggtatgtggaaaacttctgagataacctgcgtccatccgtggataaaatatatccacccgtcttccacgtgcagccgtttttgtgcggcctgccgttctgcctgttccttaaagagcaggtcaccgcggtaatttatctcccagacgagactgtctgtcgggaaacagcaggcgttggtgagcggggagccgggaccgtcctttccaaggccggtggcgttgacgatcagggaatgtggtttcagcccggccagcgtccggtcattgtctgccggcgtcggattatgtacaaagtcaaaatgaatatctggatttaagtcacttaatatttgttttgccgtctcaaggcggggaacgcttctgttggcgatgatgatatgttttggcacattgccttcaggtctgctctggctgaaataaagtgacatggcaagcgaggagccgccggcgcccatcagcagtacatcaccgtcatgatctgcccagtagttttcaggtacaaaatgctccagggcaagtccgcttgaaatagggtcttttgcgtgtccgcacagttttccgtcttttttgctgatggaggagatctctccgagcttttgcgcataggggtccagatagtcgaactggtctttgcaggcattataaaggtctatcttatgtgtagtcacaagtgcgccgagtgagttgggatcgtgtttgataaagtcgactgcttcccggtaatcttttgcgggagagtggggaatgaagtcaaatcctttgataatggcatcaagtttcagttcgccggcccatttcggaaaaacgttcatgatagaagattttgaggttgtgactcctataaaatagaaagtaggagtatcggctttggtgtaattattcatatgctttcatcctttcttaataaataaagtaataatataattatgttataacataatgagaaagacatgtcaatgaaaactgagatcacgtgtaagggagaaatgacgatttacaggcgtgtgtaccggatattttcggcagataggatattgaaaacaggtcatattttttatataatgtttaaagtttgcgcaaagagaaaggaagacaatgatggaaagagatatgacagtcggaaagcccgccaggatcatactgaactttacgatacctatatttatcgggaatatttttcaacagctgtacagtatggtagatactgtcatcgtcggaaagtttgtcggaaatgaggcgctggcggctgtgggagcgtgcgggacgctcatgttcctcatattagggtttcttctcggcctgaccgcaggatttacggtgatcacggcacagcactatggggcgggaaatatgcgggcggtccgccagtccgtggcatctgccgcggttttggccgcggttgtgtctgtgctgcttacggtcataagcatggtcatgatgagacatgtcctgaactggatgaacacgccttctgatatgtatggggaggcgtatggatatattatggtcatctgcggcgggatcacagcgcaggtgctctacaatcttctggccggtatcctgagggcggtgggagacagtaaaagaccgctctatttcctcatactggccgtgatcttaaatattgtccttgaccttgtgttcatcatcgtattcaggatgggggcggcaggggcggcttacgccactgtgatctcccagggagtatcgggtctgctctgccttgcctatattgtgaagcggatgccggagctgcacccgcacagggaagactggaaggtaaataaaagtcttgccaagtggcagctgaagatcggcattcccatggcgcttcaattttcgatcacagcggtggggacgatcatcgtacagtctgccctcaatatgctcggttcggtagccgtggccggatttgcggctgccaacaagatcgaacagatcgtcactcaggcatatgtggcgatagggacgacgatggccacctactggcagaatacaggggcaagaaagattgagcgcgtgagggcaggatttcgctccgcaacgtggatcggcattgcctatgctgttgtgacaggcattatcgtcatagctgcgggaaaatatatgaccgtgctgtttgtgtcggacaatgtagggcagatcacagagtatgtggacatctacctgaagtgtgtcggtatctcgtttgtgccgcttgtatttgtgaatgtgtaccgaaacggacttcaggggatgggattcggcgtactcccaatgctggccggggtagcggagctggtcggaagaagtgcggcggcgataacggcgtcccgtttcggcagctatgcgggaatatgtcttgccagtcctgcggcgtggcttctggcggggcttcttctcattgccatgtatttctttataatgaaacgtaagatatagcattttttaaaaacctgtgttatacttggaacaagtatgcaaaggcatgaatacgataacagaataaggagcaaaacgtatgaagagagtattgttaaaactcagcggagaagcccttgcgggagataaaaagaccggattcgacgaggcgacatgcatgggtgtggcgcgtcaggtgaagcagcttgtcgaagacggcatccaggtcgccgttgtgaccggaggcggcaacttctggcgcgggaggacaagcgagacgatagaccgtgtgaaggcggaccagatcgggatgctggctacggtgatgaactgtatctatgtgtcggatatcttccgttacgcgggcatgaagacagaggtgtttaccccgttcgtgtgcggtgcgttcactgcattattttcaaaagatgcggcgcttgcggcgcttgaagaaggaaaggtcattttctttgcaggcggtaccggccatccttatttttctaccgataccggcgctgtgctcagggcgatcgagatagaggcggatgccatgcttctcgcgaaggcgatcgacggcatctatgacagtgatccgaaagtgaatccgtccgcgaaaaaatatgacgagatatcgatacaggagatcattgacaaaaaactgatggcggtggaccttacggcatccattatgtgtctggagaacaagatgccgatgcttgtgttcggcctgaacgaagaaaacagcattgtggagacgatgacaggcacattttcaggtacaaaagtgacggtttaataaaggaggaagttaataatggatgagaaattgaaagtatatgatgataagatgaacaagacgatcgccagccttgaaggagagcttgctgcgatccgcgcaggccgtgcaaacccgaacgtgctcaataagatcatggtgaattactacgggacaccgacaccgatacagcaggtggcaaatgtgtctgtgccggaagcacgtatgatccatatccagccgtgggagaaaagcatggtgaaggagatcgaaaaggcgatcatgacttcagatctcggcatcaatcctacaaatgacggttctgccatccgtcttgccttcccggaacttacagaggagcgcagaaaggaacttgccaaggacgtgaagaaaaagggtgagaatgccaaggtagccatccgcaatataagacgtgacggaaatgatacgctgaagaagctgaaaggttccgaggtatcggaagatgagatcaaggatctggaagatgaacttcagaagcttaccgataagtttattaaagaagtggacaaagcagtagaagcaaagtcaaaagaagtaatgactgtttaacagtaagtggagacgggtaccggttttacaggaacggtacctgtctttcgtatgcgagaggagaaatcgttcatgaatgtaccacagcatgttgccatcattctggatggaaacggacgttgggcaaagtcaaaaggcatgccgcgcaattacgggcatgcacaggggagtaaaaatgtggagcggatatgtgaggaagcttaccgtatgggcatcaagtacctgacggtgtatgcgttttccacagagaactggaaccgtccgcaggatgaagtagatgcgcttatgaagctgcttcggaattatatgaagacatgtctgaagacagccgcaaagaatgatatgaagataagggtgatcggagacctgagccgcctggacgacgatatccgggggcgtatagcagaactggtcgaggcgacgaagaacaacaaagggcttaatttccagatcgccatcaattacggcagccgggatgagatggtgagagccgtgaggagactggcagaggactgtgcctccggcaggatcaaagcggatgatattgatgagacgctgtttgagcattatctcgacacacatgacattccggatccggatctgctgatccgcacgagcggagaacagagactttccaattatctgctctggcagatggcatatacggagttctattttacggaaatactctggccggactttacaaaagaggaattggtaaaagctgttgagcaatataatgctagagacagacgttacggaggagtgaaggaggaacaagatgtttaagacaagactggtgagcggaatcatactggttcttgtactgatcgcgttagtgggccatggcggatatgtattactgggctttctggcagctgtcagtctgatcggcatgtatgaattatataaagtagtgaacgtacagaataaaattcttggatttgcgggatatcttgtctcggctgcctattatgggcttatattgtcaggaaatctcaagttgaatacgatgctttccattttattcctcgtgctccttatggcagtatatgtattttctttcccctcctacagggcagagcaggtcatgaccgtgtttttcggatttttctatgtggctgtcatgctgtcttatatctatcagaccaggatgcttgaggacggaggcgtgcttgtgtgtcttatcttcctcagttcctgggggtgcgatacgtgtgcgtactgtgtcggcatgctttttggaaaacacaagatggcgccgaagctgagcccgaagaagtctgtggagggcggaatcggtgggatcgcgggggcggcgctgcttggagcgctgctggcgctcggcgtgaatgcctgggcgggaatgtcggtaagtcccctttattacgccgtcatatgcggcgtgggcggagcgatatcccaggtcggcgaccttgcggcttctgctgtgaagagaaatcatgacatcaaagactacgggaaactcatacccggccatgggggaatactggaccggtttgacagcgtgatattcacggcgccgatcatttactatcttgcaacatatcttgcataatgtgcttaaataatttgcttaatgagagaggtatcctatgaagaaaattgccatattaggttctaccggttcgattggtacacagactctggaagtcgtaagagaaaataaagatatagaagttctcggcctggcggcaggcagtaatgtggaacttctggaaaagcaggcgagagagttccatccgcggctgatcgctgtctggacagaggaaaaagcaaaggaactgcgcgcaagagtccgggatacggatatgaaggtcatgtccggaatggagggactgatcgaagtatcaaccatgaacgatgtggagatactagtgacagccattgtcggcatgatcggtatacggccgacggtggaagcggtcagagccggtaaaaatattgcgcttgcgaacaaagagacgcttgtgacggcaggccatattattatgccgctggcagaggagaatcatgtatcggtccttccggtggacagcgaacacagcgccattttccagtcgctaagagggaacgaggcaaaagcggtaaacaggatactgctgacggcgtccggcgggccgttccggggaaaaagagaagaagatctgctcaacgtacgggtggaagacgcattgaggcatccgaactggagtatggggcagaagatcacgatagactcctccaccatggtcaacaaaggtctggaagtcatagaagcaaaatggctgtttggcgtggatgtggatcaggtgcaggtcgtcgtccagccgcagagcattatccattccatggtagaatacgtggacggcgcggtcatggcgcagcttggcactccggatatgaagcttccgatccagtacgcgctgtactacccaaagagacggtatctgccgggagagcggctcgatttctggagccttggcaggctggattttgaaaagccggatatggatacattttacgggcttaagcttgcctatgacgcgggtcgggcgggaggaacactcccgactgtcttcaacgcggcgaacgagctggctgttaagcagtttttgaaccgggagatcaagtatctggaaataatagagatcatagaagattgtatgaaagcgcataagaatataaaagagccgactctggagcagatatttgacacggagagagcgacttatgagcggattgaaagcaggaggtaagacataagttttgggtatcatatttgcaattatcattttcagcttcattgtatttttccacgagctcggacatttttcactggctaagaagaatggcatcgatgtggaggaattttccatcgggatggggcctacactattttctaaagagtatagaggaacgagatactgtataaagctgcttccgctgggcggctcttgtatgatgggagaagatgaagaggcgacggactcacctggcaattttaacaataagcccgtatgggcgagaatttctgtcattgcggcagggcctgtatttaactttatactggcatttgtgtttgcggtgatcctgatcgtgatggtaggttatgataaacccgtagtccagagtgtggacagtggattcccggcccaggaggccggaattgagccgggcgatacgatcgtgaaaatgggcggaaagaagatcaacattttccgtgagatcaatttttataatcagtttcatcagggagaaaaagtagaagtcacgtatctccatgacggaaaaaaagagacagccacactgacgccgaagcttgacaaggagagtgactattaccgtatcgggatcggcggaggctcaaatacaaaggccaatattggaactgcgctgcagtacggagcgtacgaggtgaagttctggatatgtacgacaatggaaagcttaaaaatgcttgtgaccggccagataggcgttgaccaactgtcaggtcccgtcgggatcgtagatgcggtggacagcacataccagcagagcaaatcgtatggtttcctcatcgtgctggcgcagctgatgaatatatcgatcctgctgtctgcaaacctgggggttatgaaccttcttccgctgccggcgcttgacgggggacgtcttgtctttctctttatagaaatgatcagaggaaaacgggttcctccggagaaagaaggctatgtgcatctggtaggtattatgctgctcatggcgctgatggtctttgtcatgtacaatgatatacggcgggtgtttttttaaacgtcccggacaggggccgtgggaggacgtgaaaacatggataaaaaaggcattgttcttcttgtggaagacaacgaggcgatattacgcacgaaccggcgtatcctggaagcggaaggcttcacagttctttgcgccgggacgctctgcgaggcggggcagaggctgtccgaagagacgcctgacgtgctcgtgctggacatcatgctgcctgacggcagcggcatagagttttgccgggagatccaggagctgactgccgctccggtactgtttctgacagcgctggatgaggatcacgaaattgtagaaggattgacggcaggcggcagtgactacattacgaaaccgtacaacatggaccagtttgtggcccgtgtcaaagcccagcttcagcttgcccgccggaaccagagggtcattgagcaggtaaaaacactgaagcgggggccgctcacgctggaggtgctggcagggcgggcttatttgaacggtgcggacctgctgctcagcgccaaggaatttgcgctgctgcggtatctggtacaaaatgagggatatacctttcccaaagaggtactgtatgaagcagtgtggaatctgcccgctgtggacgatgcccgcgtggtaaagagccatctgtcccgtgtgcgcgcgcggctgcaggggagcggctacaccatcagggcagtgcgcgggaaagggtatcagtttggaccggacaagtaaaaataagaatacggcagaaagtcaattttggctttctgtttttttataaacattttcacgaccgctgcagggcattaaaaaaggactgcttttttgggaggtgcagtcctttaggaaaagttatgaaaaagaattttaagtttgttcttctgaacaattattagtataagaggaaaatgtgagaaatatgtgtttaaactttgaagatattgttaataaatggggattttgttgggggatgttttttgactggcggtggacggcaaaggggcgggtgcacaggggggtaaaagagcgctccggcagccgggtatccgtaactgcagaaagagccggaatcagacaaccgagcctattcggtatgaaatcctgaaaggatttcctgcctcagaggctctcgggaatgttatttgagataacattcccgtgtctgattccggctctttctgcagcaacggctcccacgcctgcctccgaacgcgcttttacccccctgtgcacccgcccctttgcctgttcatcatccagatttctaaacacctcccaacgggaggaatcccctggggtgtccagatggatggacgtgtatctgggaaacgggttatggttttgtatgtaaggtggcggttacagtaccaacatctggaacataaagaagttataacgacagtgcagatccattggatcttgcccgagggagtgtcacatgttggagaaatttgagttacgtggagtgtcaggctggggaagggcggcgggggactgtggggcgttggagggagctttgtcaagccgttagggaagaagacgcggcagagacagacaccgacagaattccacaggaaatctggatgatttcctgtgtcagctgtctcagaaactgcacttgtagtgcagtttctggtctgtctctgccgcgtcttcttcccttacggcttgcaagcgcaccgaccgtcccacagttccccgccgcccttccccagccgtacgctgcgatcccctcaaatatctccaacaaaactcccaatcactgaagctcggctattctggatactcccacatatatctcggatattttgtaccatgtacggtaatcgacgatcccggtctcggggaggccgaatacggactggaacttgcgtacggtagcctccgtagcaggaccatatacaccgtccgcggttatttttggaatcgccggatatgctccggctatgacattgagctgttcctgcatctgcagcaccttgtcgcctgacgcgccgatctcaaggttataaccgggccaggaggatgggataccggacacggcttctgctgtattaatgtacatatcgtctccgtaataatagcggagaatttcaatagggctgtatccctgatcgccaagcgatttgctgccccactgagtcatccagttcggacactgtacccggcgtccgtcgcagtactgcgtcaggatgggctggcgcacgttcggcctggaaagatagttggaaaataattcgtctacgatcgctgagatcgtgtcaaagaagttccgttcagggatccatttatggtcgaatgctgttgaggaagtgatcgtaaaatcatatccctggttccggtaccattctgtatataccctgtttaatgtaaaggacatgatggcaaggacatttgcccggatcgtgtcctccggccatgtggcatatatttcgctggaagccacatttttaatataatccttgtatttgacataatagttctgggctgttgtatctctcgggcttccgtcgtggacaacgatatattcggggacgacgacccggctcagaacgatttcaccgctctcatccacaggttttatttcctcttccggtattttgggcggataaacgccatataatgtgtgtgcgggtattacaaatacgttttccgcgttttccggatcggtcaggggacgaagctgtatgttctgcagcgccgtaacgtcaggaagaatctctgcgccggcaatgctgatcggctcaaaaccgggtgcatcgacctgaagtgtatactcggcataaggctgctcctctatggcggggttgaggctgtactccagaggcggagcagccagctcaacggtatccgtctgtccggaggcatctgtattcagctgttccagctggctgtcgggaacgccggtgtaagagatggatatggtagcgtcattgacgggataagccgtgacttcggatgtgatgctgatcttaagccgtcctttatcaggtgtgtcaggcagattcgggttcatttcattcatgtcagtacctcgtagagactctgttactgttatcttatgtgaatggaaccggaaaagttacagcagattaatggttgtgtatttatatagaattgaatataattatatgaaacagtaaaggagcaggcatgggaagaagaaagagaaaatcaggatgcatcagtgccgtcatcggtctggccgtgatgttctgcattgtcatactggctgcgatgggaggcttcctcggcaaaggcgttaaaaagggtcttgcggaaggcgtggcaaaggggatgaacagcgcgaggcagatcccgtttcaggagatttccataacagatgcggaactggcccagaaatattattaccggcagcttaacgaggcggagcagactgcgtacaaagaaatagcccagggagttaagatgaatgtagaagagatctacgtacacgcagccgacgccgacaggaccaacacaatattccaatatgtcctgaaagattttccggagatattctggtgcgacggtactacaaagagcacgtcgtacgaaggccaggagacttatacagtccttcagcctgtatactcctacgcagaggaggaaaagacgcggaaaaaagcggagatcgagagtgccgtaaacgactgcctctccggcatcggggaaggggcatcggactatgataagattctgtatgtgtatgaatatattgtagatacggtagattacgatattgcatctgaggataatcaaaatatatacagtgtgtttgtcaacaaaaaatccgtctgtgccgggtattcaaaagcgacgcagtatctgctggaacggctcggcgtattctgtacttacgtgacagggacgacatccgggggacagagccacgcgtggaatctcgtgaaatgccggggagactactactatgtggacacgacgtggggggatcctgtgtttcaggcgacggagggaggagagatagacccttcctatatcagctatgattatatgtgctgcgacgatgaggagcttagaaagacccatacgcccgacacagaagtgccgatgcccgagtgcgtcaagatggactttaattactataatgtcaacggaatgtattatacggaatatgacggtgaaaaagcgcttcgcgcaatgaatgacgtgatcctggaaaaaggcaatccggtcgtattcaagtttgccgacaggcgtctttatgagcagggacgggaggacatcttcggaacccagataaaacgtgccgcgcagaatctggcagactggtacggcctgacagaggttaagtaccagtatatggatgaggcggaattaaataagatcacaatttactggcagtataaataaagaaaggctccccgctgttccggaagaacacaggggagctttttgccgccgtatatttttactttattataaagagatcagttcagcgccaagagaatgcctcattttcgagactatcttatcctttgtagtctgaaaaactgcggagaactcggaggatatacagtcctgcacccgctttaagttactttcatcactggcgttcagactcttgccgtcctgttccttgcgcattttttcaacggttatgcccttccacatcttgagccattcgccgcagtctctggacttcatgacctgaatatattctctgtcacgtactttgttggagctgtcgtacatttcttccatttccggtaattcacgcatcagttcgtctgcctggcctttggtcagaatagaccgcattttgtcctcgtgctcggtcttcacgtacagcattgtcgtcgtatcacccaccggctggagccagtaatagttctgtggtttgctcatgaagtccggagtgccgatcttcttgatgaaacaaactttactgcagccataaacaacaacgtcattaaccttatacatatatacaccatactttctttaactaaagagccatttgaaaaagatcgaaatattaagcaaacagcggttactgttctattatagcatactttttaaagaattactaaccctgtagagacgaaagacaaatctgccgcccgaaaacaaaatatttatagttgaaaaaactcggaaactgtagtataatttttacaatttgtgcagacaaagatagtcagcagcatatggggaggcggttgtgcttgcacacactgccttttattctgcgcagaccacatattcgcaaaagtgctgctgccgtcaagccacaatagtatacagttatggaagggaaagggtgaatatatgaaagcatttcttatattggaggacggaaccgtctttagcggaaccagcataggttccaaaagggacatgatcagtgagatcgtgtttaatacctcgatgacagggtatcttgaggtgttaactgacccttcttatgccggacaggccgtggttatgacttatccgctcatcggcaattatggtatcacgccggatatggaatcgaagaaggcgtggccggacggatatattgtaagagagttatccaggatgcccagtaatttccgttctgcgggttcgatacaggactttctggaggaacaggatattccgggaatcgcaggggtcgacactcgtgctcttacgaagatcctgagagaaaagggaacaatgaacgcaatgatcaccaccaatgagagctatgatctggatgagatcattccaaaattaaaagcctacacaataggcgatgtcgtatctgaagtaacctgcggggaaacttatatcttagaaggcagcggtccgaaagtggcacttatggatttcggggcgaaaaataatattgccagatctttaaatcgaagagggtgtgaagtgactgtctatccggccgacacaccagctgagacgatcattcaatctaatccggacggaatcatgttgtcaaacggccctggagacccggcggcctgtgtgtctgtcattaaagaaatcaagaaactgtacaatacgaacataccgatctttgcgatctgtcttgggcaccagctgatggcgctagccaacggcgggaagacgtataagctgaaatacggacaccgcgggggaaatcatccggtgaaggatctgagcaataaccgggtatacatttcttcacagaatcacggatatgccgtggacggcagttccatggaccctgcagtggccgaggaggcgtttgtcaatgtaaacgacgggacgaacgaaggattttcctataccggaaagaacatattcaccgtgcagttccatccggaggcatgtccgggccctcaggattcaggttacctgtttgacagatttatggatatgatgaaaggagcgaaataatgcccagaaataaagagatcaagaaagtactcgtgataggttccggccccattgtcatcgggcaggccgcagagtttgactatgcggggacacaggcgtgccgttctctgaaggaagaagggctggaagtcgtccttttgaactccaatccggcgacgatcatgacggataaggatatcgcagaccgtgtctatattgaaccgctgaccgtcgaggtagtggagcagctcatattgaaggagaagccggacagtgtgttgccgactctgggaggccaggctgccctcaaccttgccatggagctggatgaaaacggatttctccggagaaataacgtacgtctcatcggtaccactacggagacgatcaaaaaagcggaggaccgtctggaatttaagacgacgatggagaagatcggggagccgtgcgcggcatctctcgtagtggaacatgtggacgacggggtgagatttgctgaaaagatcggctatccggtcgtgctccgcccggcatatacgctcgggggaagcggaggcggaatcgcaggagacagggaacagcttgtggagatactggagaatggactccggctttcacgtgtggggcaggtactcgttgagcgctgcattgcggggtggaaagagatcgaatacgaagtgatgcgggacggaaacggcaactgtatcactgtgtgcaacatggaaaatattgacccggtaggtgtgcataccggcgacagtatcgtggtggcgccgtcgcagacgctcggggataaagagtatcagatgctccgtacctctgcgctgaacattataagcgagctgaatatcaccgggggctgcaacgtgcagtatgcgctgcacccggatacatttgaatactgtgtcatagaagtgaatccgcgtgtgagccgttcatctgcgcttgcttccaaggcaacgggttatccgatcgccaaggttgccgcaaagatcgcgctcggctacacgctggatgagatcaaaaatgcggtcacgaagaagacgtacgcaagctttgagcccatgcttgactattgcgtcgttaagcttccccggcttccgtttgacaagtttatcagcgcgaagcgtaccctcacgacccagatgaaagcgaccggggaggtcatgagcatctgtgacaattttgagggggcgctcatgaaggcgatccgttccctggagcagcatgtggacagtctgatgtcatacgatttctccggcctgacaaaagaggaacttctggaacagctggagactgtggacgacatgcgcatctggaggatcgcggaggcggtgcgcaaagggcttacgtacgatgagatccacagtgcgacaaagatagacaggtggtttattgacaagatagccatgcttgtggagatggagcagaagcttcagaatacgtcattatctgccgaggtgctccgggaagcaaagcggctggagttcccggacaatgtcattgccgggctcacaggcaacacggaacggcagatccatgatatgcggcatgagtacgggataacggcatcctataagatggtagatacgtgcgcggccgagtttgcggccgagacaccgtattattactccgtgttcggcagtgagaatgaggtggaggagaccggcgggaggaaaaaagtgctcgtgctcggttccggccccatccgtatcggacaggggatcgaatttgacttctgttccgttcactgtacgtgggcgtttgccaaagaggggtatgagacgatcatcgtcaacaacaacccggagacggtgagcacggactttgatattgcagataaactctattttgagccgctgacgccggaggacgtagaaagtatcgttgatctggagaaaccggacggggctgtggtgcagttcggaggacagacggccataaagctcacggaagcgctcatgaagatgggcgttccgatactcggaacatctgctgagaatgtagatgcggcggaggacagggaacgctttgatgagatactggaggcgtgccggatcccgagaccgaccggaggaacggtatacacggcagaggaagcgaaagaggtggcaaaccgtctcggctatcctgtgctcgtacggccatcgtatgtgctgggcggacagggcatgcagatcgccatcaatgaccacgatattgacgagtttataggaatcataaaccggatagcgcaggatcatccgatcctggtagacaagtatctgcagggcaaggagatagaagtcgacgcggtgtgcgacggggaggacattctgatcccggggatcatggagcatattgagcgggccggcatccattccggcgacagtatctccgtctatccggcgcagagtatctctgaaaaaacgaaaaagacgatagaagattatacgcggaagctggcgcagtctctgcatgttatcggcctgattaatattcagtttatcgtctgcggcgaggatgtctatgtcattgaagtgaatccccgttccagccgtacggtgccttatatcagcaaggtgacgggcataccgatcgtgccgctggcaacaaaggtcatcatcggctgtaaactgaaggacctcggttatacgcccgggcttcagccggaggctgattactacgcggtgaagatgccggtgttctcgttcgagaagatccgcggggcagatataagcctcgggccggagatgaaatccacaggcgagtgtctcggaatagcgaagactttcgacgaagcgctctataaagcgtttctcggggccgggatcaagctgccgaagtataaaaatatgatcatcacggtacgtgacgaagataagccggaggcagtggagatcgggcgccgttttgagaagatcggataccgcattttcgccacgcgcagtacggcggaagccatgaataaggcaggagtgaaggcaaacccggtcaataagatagagcaggaatctccgaatctgatggatctgatcctcggacacaagatcgatctcgtcatcgatacgccgccccagggagcggaccggtcaaaggacggtttcatcataagaaggaatgccattgagaccggcgtcaatgtgctgactgcgatagataccgcagaagcgctcatcacaagtcttgagaatacggacataagaaaactgacgctcatagatatagcaaagatataagagggatcggggcacggcaatgccagaaggagccgtgccccgatcttgtttattgtgccggggcagaagttcaaatcctccggccggatgttgcgttttggaacagagaggaaaagttaagatttattgaattttccgtgttttttacacaaggcgcgcaaaatattgtagaatattttcaggatgaaagatttcaaagagtgggagcagacatgatgtataaaatattggtcgttgaagatgatatgactatcgcgggcgcgctggagaggcatttgtccaagtgggattatgaagtccgttcggtggaagactttaagaatgttatgaatgagtttgtagaatatgatccgcagcttgtactgctggatatagcgctgccgttttttaacggttttcactggtgcaatgagatacggaaggtttcaaaggtgccgatcatttttatctcttctgcaaatgacaatatgaacattgttatggccatgaatatgggcggggatgaatttattgaaaaaccgtttgacttgaatgtggtgacagcgaaagtgcaggcgctgcttcggaggacgtattcgtttcagggagctctcaatgtgatcgaacataagggcgtgctgctcaatctcaatgatgccgctgtcatataccgggaaaagaagctggaacttacgaagaatgaatttaagatcctgcagtcgctcatggaacatgcaggccagatcgtctcccgggatgatatcatagagcggctttgggaaagcgacgaatttatcgacgacaatacgctcaccgtcaatgtggcaaggctgcgcaagcggctggagacgatagggctcggcgacatgatcattacaaaaaaagggataggatatatggtggaagtatgaggctgttatgtgattatctgaaggaacatatcagatccgtatgtctctatatcggttttatcggcatatttgcagttgttttctatttgagtaatgtccggcttgacgcggtactgtatgcattctttttgtctgtcatatggcttgtgctgtacggggggatcggatttgtacggtatgcagacaggcacagaaagcttctggaagccggaaagcagataaagacggtctgggcggagctcccggaagctttcggcctgatagaacaagattaccagagcatgatcaaagaactctttgacagtaaggtggagatggaatcggaggaggagatcgcccggcaggagatgatagattactacagtctgtgggcgcatcagatcaagacgccgatcgccgccatgcgcgtcctcctgcagtcgtgggaggaggagcagacaccgggagaccagacacatctgaaggaattaaagctggaattatttaagatagagcagtatgtcgagatggtgctctcttatctgcgcctcggggatatggcgtcggacatggtgcttcagtggtattccctggacgatattgtgcggcaggctgtccgcaagtattcccagatgtttattctgcagaagatgaagcttgactttacgccgtcagaagacatggtgctgacggacgagaaatggcttgtgtttgtggtggagcagctgctctccaacgcgctcaaatatacgagggcaggcagtatttccgtgtatgcggacaagagcagaggggcggaagttcttgtaattgaagacaccggtatcggaattcaggaagaagaccttccccgcgtgtttgagaagggctttacgggatacaacggcagaaaagataaaaagtctacagggatcggactgtatctgtgcaagacagttatggacaggctgggccacggactgtggatcgagtcggaggtcggcgcaggcacgagagtatttctgtctctggagagagacgagatcgtgccggagtaggagcataccttacacgattgtaagtttaggataaggaaatgtaagtcaaatcaatggcagagcatttccttcttttattataatgaacttgtaaaacagaacagacagaaagaaaggtaggtacggaacatgtcattgttggatgtcaaaaatgtcagaaaaatatacacgacccgttttggtgggaatcaggtggaggcgcttaagaatgtgagcttttctgtggagccgagggagtatgtggcgatcatgggggagtccggttccggcaagacgacgctgctgaacattctggcttccctcgataagccgacagggggaaaagtgtatctgaaaggaaacgatctgtccaaggtaaaagaaaaggagcttgctgcgtttcggcggcagaatctcgggttcgtgtttcaggactttaatcttctggatacgttttctcttaaggataatatcttccttccgctggtgctttcgggcaggaagtacgaagagatggaaaagaggctggcgccgatcgcagagagtctcgggatcaaaagtctgctgaataaatttccgtatgaggtgtcggggggacagaaacagcgtgcggctgtggcgagggccatcattacaaagccgcagctgatcctggcggacgaaccgacgggggcgcttgattccagggcagcagacgaactgatgaacctgttcggcgtgatcaacaacgaggggcagacgatcctcatggtgacgcacagtgtaaaggctgcgagcaacgcaaagagagtgctctttataaaagacggggaggtattccaccagctgtacaggggcaaccttacgaatgaacagatgtaccagaagatagcagatacactcactgttctgactacgggaggtgaaaggggtgaataagtccatatattccaaacttgcgttgacgaacatcaaaaataaccggaaaacctatatcccttatatactgacggcggttctgacggtgatgatgtactatatcatggatgcgctcgccagaaataaaagtgtgggggacggaagcctgaggctctgcctgaattacgcccttggcgttatcatcgtgtttgcggtcatctttttgttttacacaaacagcttcctgatcaaacggaggaaaaaggagattggagtgtacaacattctcgggatgggaaagcggcatattgcaaagatgctgacggtggaatctctgatcacagccggcgcaagcatcgctgcggggcttgcaacgggcgtgatattcagtaagcttatgtacctcgtactgttgaagatcctccattataaaataaatatgtcctttgagatctcaccggtatccgtcgcgcgtacgatcctgctgtttgcggccatatttgccctgacgctgctgtataatctcatgcagatacatctggcaaatccggtggagctgctgcggggcggaaaccagggggagaaagagccgaagacaaagatcctgctgacgattttcggcgttgggacgatcgggatcggatactatatcgccattgccacggaatctcctctggaagcgctcatgttcttttttgtggcggtcatctgcgttatcctcgggacgtacgcactgttcaccgcaggcagcatcgcgctgttgaaggcgcttcggaaaaacaagtcattttactataagacgaagcattttacgtctgtatccggcatgatctaccggatgaaacagaatgcagtcgggcttgccaatatctgtatcctgagcacgatggtgctcgtgatggtctcgacgacggtttctctgtacgccggtatggatgatatactgaatacgaggttcccggaacggtttcgggtgaccaactatgcggccacggaagaagggatggaaaggaccggccagatcatctcgcaggagactgaaaaagcaggcgtgacagttaagaataaagtcgcataccgttccggcgagatgtccgcaatattagacggagataaagtccacctggaagaaaccggaagctatgggatgagtgacatggttgagctgagcgttatccctctggaggattacaatacatttgaaaagaaagacgtatcactgggagacgatgaagcgctcatatacatgacgggcagaacatacggaaaagatacgatacaggtcgggagcagacggtacaaagtggcccgcgagctgaaagatatggtactggagagaaagaataagtccaatgtggtggagcgcatgtacatggtcgttccggatcttcagcagacggtgaagatcacggacgaagcgtacgggaacagtacgatggatgatgcgtggaccgagcggatgggaaatgtgcggtatatcgtccgtctcgacttaagcggaagcgatgaaaaatgcctgagcgcgatgaaagccatgcagaagcagatcgagtcagaagtatctccgtctgtatgcgaaagcagggatataagcgtggaaagcttctacatgctttacggcggtctgctgtttatcggaatctatctcgggctcatgttcctgatggcgaccgtgctcatcatttactataagcagatatccgaaggatatgacgacaaagaacgctaccagatcatgcagaaggtcggcatggacaaaaaagaagtgaaacgttccatccgaagccaggtgctgactgtatttttcctgccgctcatcgtggcgatcatccatatcgcagtggcattcaaagttatgacaaagatgctggcaacactgaatctggtaaatgtaccactgtttttgacatgtacgataataacagttgtagtttttgcgatattttacgcaattgtattcgcaattactgccagagagtattataagatcgtcaattaacgaaattttgaaaggggtctgacccctcccatataagggggtcagacccctttcaaaattgtctcaaaattcaacatacttgaattttagaatgtactatattacaatgaatacagtaagcagttacaggaaaaaggaggaagcagcatgacgaaagcaggagaaagggaagtcgttacggtggagcgtgccaacggcggagccggatttattatgaaagaagcgctcataagcgcagaacagctcggggaacactgtaagatgttcagccgtgtgactttaaagccgaactgtgagcttggatatcacgagcatcacggggagacggagacgtattacatattgagcgggagcgggatgtatgatgacaacggcaaggcggttccggtggaggcgggggatgtgaccttctgcagggacggagacggacatggcctgaagaatacggggacagaggacctttccttcgtggcgctcatattgaaattataggatgacgatagaaccggcggcagtcagaaactgccgccggacttttttttcggatatatcgtgagagattcaggagcttaatcgttctctcagacaggccatgagccggtcattgtcctctggcttcatgatgcagaaccggatatattctccgtccaggctctcaaaggaggaacagtcacgtatcataagcccgcggcggatggcgtattcaaatacatcgaaggaggtgagcccctcccggaggagcctgatgagaataaagttggcgcttggacggtacgctttgacgctcttccacgtgcatagttcacggtacagacgggagcgctcggaatcaatgagcgaccatgtcttctttatataggcgtcatcctggagcataagctccccggcaaaggcgcctacgctgcttaagctccatggattctggtgccggcgcagggaggctaggaaatcctcattgcttgtgatcccgtagccgaagcggaggcccggggccgcgaaaaatttggacacacctcgaatcaccataaagttgtcatacttcgggataagcccgatagcggtgacagacgcaggctctggagcaaactctgcgtatgtctcgtcgatcatcacaaagatgcctctttcccggcacggccggatgatttcctcaagttcaccgcaggtgagcgcagaagaagttggattgtttggattgcacaggatgagcagtccggtttccggggtgagggcggacagaagatccggaatatcaaggataaagtctctgtcttcccgcaggttataatattccagcgtaccgcctgccaaagagagttcccgggcatactccgagtaagtcggaccgatgacgagcgcctttttgggcttctgctggccgatgagcagggagatcagctcagtggatccgttccctacgacaatatgtgccgggtccgcgtggcagtatgttccgatcgtctggcggagcgccgtgtaattgcggtccgggtagcgggtgatgacatcgaggtgagaggcgagctgttccttaacatattccgagaggccgagcggattgacgttagcgccgaaactgacgatgtcctcctgcggtatatggtagtattctgagatctgttcaatatcacttccgtgaaattctggttttttatccatatctatacttcctgtctatatattttcaagattttgtatctacagcattgccattacagtcagaacaatgctataattcattatagtatgtttttagaaaaatgcaacgaaagaagcaggtggcaggcttgaaaaacaaaattcagaaattttctaagggtgacttccataatgcacatcccgatgtgatctttcaggaaaccaatctcgtaatgatcatcggagagggggaggtgtacaggggaagtttttctgtgaaaagccagacagaggggaatatacgggggttgatatacccgtcttcttttcgtgtacattttaaagaccagggatttgaggggaatcctgcaagggtagaatttacctatgacggcagaggcctgcgtcccggtcatgtggaagaggggaaatttacggttgtgtgcaacgggggggagtacgagctgtccttcacagcgatcatcgagaagccgtacgtgatgacctcctatggaaaagtacagagtacagacgatttcagaaaactggcgatcaaagattattcagaggcggggcggctgttccgctccagagaattctatgagatattaaaatatgaaaacgagcgcatcttttacctctacgataatatgagaaaatggtctctcggcgagcaggcgatggaagagttccttgtgggcatcaagcagaaagaatgcatcttcctcacacttccgggggaaggcatgctgtttgaggatatcgaggagtcgacgaaagggacccttacgctcatgaagaatacgtgggggttcatgccgatcaaagttgaggcggaggggcggtttatcaaagtgctccggccggagctgagcaccgaagattttgtcggaaatacgtatgaggtggagtatctcgtgaggccggaagaactgcacggcggaagaaacttcggggcattgaagttcatcaccccgtatgagacgctgatctatgagatagaagtgcttcagaatcaggattatgacgaagaccaccgaatgaaagagctgctggaggctcagattctgaaaggttatgtcggctatgtggccgggcgggtagagctgaacaactgggtggagagcgcgattgagaagatggcggctctccgcaagatggatccgcagagtgagacgcttcagcttctccaggcccatatatatgtagccggcaataagatagaagaggccaagtggatacttgagaattacaattacaaccggtttgccatagggaaggatcccgtgacaaactgttattacctgtatctgaccgctctcatccgggggaagggcagccatatagacagagtccttgacgagataggcaagacttacatgcgccatcaggactcctggccgctgctcagcatgataatcaatctggatccgagataccgcaacccatataagaaaatagaggtgcttgagcagcagttcagttttgagatacatgaagtgcttttttatcttgcggcgtatgaatgctatcaggaaaaaccgacgctgctgaaaaaactcggaaaatttgagatccaggtacttaactttgcctccaaatacaggctgatgacgaaggagctggcgctgtacgtcgccaattttgccagccagcagaaaaattacagcgacgctatgttccggatcctggaacgcatctacaagatgtacagtgagacgatgatactgaatacgatctgcacgctgctgatcaagggaaataagacccagcagcgctattttgagtggtataagcgcgcggtggacgcagaactcaaaatagcgcagctttatgagtattatatggtgacgatagaggaagagcgggtgagaggcccgctgccgaaatccatatttctgtactttatgcacggcaatacgctggattacaagaaagccgcatttctgtatgccaacctgatcacatatgaagaagaaggcagcgacctgtatctgagttacagagaacagatggtggcttttacatgggaacagctggaaaagcgccatattacagaatcgctgaagattttgtacaagaggttcctccgggaagatgagatgacttcagagcgcatggaggcgctgcacgacatctgctttgcctatgagatcacgacaagagtgcgcaatatgaactgtgttcttgtcattgagaaggacggaaatgtcaggcagaggatcccatacgacgaggaggacggcgcggtcatctttctgtatgacaaggagtcgagagttgtgtgggagtctctggagggaagacattatacggattctatcgcttatgagacgaagcgtctgttctacgagccgcgtttccttgacatgtacaaaaaatacgcggcccacgccggtatatggaagcatgaagagcagaaacgggaggccacctttgacagtatacgggagcttgggacggatgcatttgacgaaaaggatatcttccgcctctgcagcaaaaggataagagaagacaactatgaggaggatgagtttttaagcttcctttgctttgaactttttaagaaggagcagtatgacaaagtaacgctgacatatcttgccaactattactgcggggcgacttcggatatgaagcgactctggaaagtgctgagagaatatgggatcgcgtccaacaaagtcggcgaacgtattatcacccagatggtcttctccgaggatatgttcatggaggaagatatatttgaggactattatctgtccgacagcgtatattttcgtcttaagcaggcgtatctggcctatgtttccagagagtttgtgctgaaaggcagagagacgggcaggatcgtgtttgacattatcatccacgagtgtgagaagaaggaagaactgccggatatatgtaaaatagcccttttaaaatatttttccgcgcgggattatacggtggacgaagagccggtactccacgaagtcctgcgggaaatgtgtgagaaacagctcgtattcccatgttatctgaactttaaggaggcgtggctcagagagaaccagctctatgacaaggctatgatcgagtaccacgcaaagccgggcagcagggtagagctccattacaagctgaagcagggcagaaaagaagaactgggatatcacatggaagtgatgacgccggcatatgagaacatatatgtaaagcagtttatcctgtatgcagacgagagtatcagttattactttaaagagacagctgacaaagagcgtattacgacggagaaaaagacgctttccaatgaaagaaagaccgccggcacaggaaagttcggcaggctgaatgagatgtccgccatgagtcctgcaagcaggaaaaaggccatgcttctgtacagggaggaagagatcatggcggaagaaatatataaattatactaggagaggaggagacggtaatgaacaaggggagtatgctcggttatgatctgaacgagaagagctgtcagataagttattatgatgagacaaaagatgagccggtgacgatggaagtcgcggtggacaattaccagattcctctcatgcttggatattttaaggaccgctgggtttacggcaaagaggcaaagagactggcgacggtcaatgaggggtgcacggtcacagatcttttcaaccgggcggtcagacaggaaaaagtccgggtcggggcgaagacgcatgacgcggtctggcttctggccaagtttataagcctgtcgcttgaggaatttgacgagatcacgtatatcactttctcggtccctgagaataatatcgatatgacgaagatgctgaaggggatcggaagacatctcggaatagagaagggccatatctgcgttcaggattataaggaaagcttctgtcactatatgttctatcagccgaaagaactgtggcagtatgagtcggcgcttttttactgtgatgcccgtgagatcaaggcatacatgctgcgcagactcaacgcggtcgccggccgggggaatgaaatgttcgtcacggtcgatgaagtggcaagcgctcagatgaaagagctggaagctatttatccggtgctgaatgtggataaggcaaaggacgcggacggcaggttcaagactttcatacagagtgtctttgagaagaaggtcgtctcgtctgtttacctgaccggggaaggatttgagaacaactggtatccaaactcactgaaggtactctgcaacggcagaagggcatttctcggaaataatctttacagcaagggggcctgctatacatccatccgcagatgccgggattacgatgaaggtcctgtctatctggacgagacgaagatgaccgagcagatatgcctgcgcatgcgggtggacggacaggaaggctggtatcctatcgtctcatggggaacgcactggtatgaggcggacggacagtgggaagtgatactggaagatacgtcggatgttgagatacatatcgagacgctggcggcgggggatctccaggtggaaacggtacagcttgacggtctgccggagaggaaggactactctctgcgtcttcagatcgagacgatgtttctcgatgagagaacgtgtaaactcaggcttaaagatatcggattcggcgaattctatccgtcttccggctttcaggtggagaaggagatacatttaggagggatcaatgggcagtttaattctatgtcataagaaaaaagcaaaacagccatacgagatcacgaggatccatatacgtatatacacgatagaagagctgtgctattacatctgcaacaacctctacctgatagattacacgatcatgaacacccagctctgcgactggatagagcaggagcttgagcttaaagcgctggcggagagactgaggcaggagatcacgcagagctgttccgcggaacagtttgtgctgaccattctgaaggagtccaccatatacgggcaggcggatatcaacaagatacagagtatactggaacagctgcagaaccagaatgaagtggagcgggagaaatataaggcggacagtcttctaaagagcggagagtacgcctctgcaatcctcgtatatcaggcgatcgtgagcaaggagtgggacgattcactggacaaggccttttatggacgtatctatggctgtctcggtacggcatacgggcgtctgttcttatatgaggaagcggcgaagatgtatcaggaggcttaccgtctctgtgaggagccgcagatgctgaaagcatatatttacagctgctacagaggcatgccggatgagaagttcgtaaagatgatgtcgggcaatccggcgtatttaagcacggcgtctctgctgaaggaagatgtgaagagaatacgcagggagatcgacatggatatcagcaaagagcagctggaccagtggaaaaaagagtaccgcaggattgacaagaatcacggaatatgctaatataacagggcgatttagtgtggtaaagtaatcaattgatgaactgataacacggtacagtgaatggacatcgcatgcgatcgcagatgaggaggaagcatatatgaaaagaaaattagcagtattactcgttcttgtaatggttgtgggaatgacggcagcgggatgcggaaataaagaagataagaaagctgacgctaagacagacagcaaagaagaaaaagcagacaatgacgacggcacgtttgtcgtgggatttgacgctgcgtttccgccgtacggctacaaggacgacaacggggaatatgtgggatttgatcttgaccttgcgcaggaagtgtgcgacagaaacgactggaagcttaaaaagcagccgatagactgggattcaaaggatatggagctgagttcaggaacgatcgactgtatctggaacggattcacgatgaacggaagagaagacaaatatacatggtcagacccgtatgtagataacagccaggtgatcgttgtcccggaggactccgacataaaggaatttaaagacctggccgggaagatggtggaagtgcaggccgattcttccgcgctgcatacacttgagagtgatgacaaagaagagggcggacaggcggaactggctgccacattcggagcgttaaaccaggtggcggattataatacagcgttcatggacctggagtcaggggcatgtgaggcgatcgccatggacgtaggtgttgccaattaccagatcgacagcagaggcggcgggttccgcctgctcgatgagaaactttccacagagcagtacgggatcggattcaaaaaaggaaatgaagagctgcgtgatacggtacagaagacgctgaatgagatggcagaggacggcactttggacaagatcgttgaaaagtgggccgacggcggcatcagcgcagatgcggtctgcctcggaaaacaggccgaatagagagtgtattatacataacagaggtcaggtcagaaaggcctggccttttcagtctcaaggagaatatatctagaaatgtgattcggaggaatgagtagatgaatatggctttgattctaaaacagctggccggaggtatggtcgtatcgatagagatatttgcggcaacgctgattttttcgcttccgctcgggctgatcgtgtcgttcggaagaatgtccaggattaagcccgtacagtggatcacgaagctgtacatatcgatcatgcgcggtacgccgcttatgctccagctgatggtagtatattacggaccttattatttgttcgggatgcggatatcggcaacgtaccgtatgacggcggtgctgatcggatttgcgataaattacgccgcgtatttcgcggagatatacaggggcggtatagagtccatatcagaaggacagtatgaggcggcccgggtgctcggttatacaaggccccagacatttttccgaatcatacttccgcaggtgatgaagcggatccttccgtcagttacaaacgaagtgatcacgcttgtaaaagatacctctctggcgtttgtcgtagcggtgccggagatgttcacgaccgcgaaacagattgccgcggcccagacgtccatgacggcattcgtggcggctggtatcttttattacgtgtttaatctggtcgtggctgttgtgatggaagcgatagaaaacaaattaaactattaccgttaggaggatatgtcatgagtctgttggagatgcacaatatcaagaaaagttttggcgagacagaggttctgaaggatatatccctcacggtggaaaaaggagaggttcttggcattatcgggccgtccggctccgggaaatcaacgcttcttcggtgcgccactaacctggagactccggattcgggagagatacggtacgagggcacctttggccttgtattccagaattttaatctgtttccacattattctgttatgaagaatatcatagacgcgccgctcaaggtgcagaaacggaaaaaagaagaggtcatagaagaggcccgtatgctgctggcaaagatggggcttcacggcaaggaggatgcctatccgtaccagctgtccggcgggcagcagcagcgggtatccattgcaagagcgctcgccatgaacccggacatcctgttttttgatgagcctacgtccgccctcgatcctgaacttacaggggagatcctgaaagtgatcaaagacctggctgcggaacatatgacgatggtcatcgtgacccacgagatgaactttgcaaagaatgtatcggaccatattatatttatggataacggttatattgcggaacagggcaccccggaggaagtctttggatcatccaacgaaagaatgcaggagtttctcgggaaatttgggcaaaacttataagtagattactgtttattagaaaaacttataaataaaagtgtaataaataatgaataagaatttgtacaaggcagacaggaatattgcttttccgtctgccttgtattatacttatacgtgcataaggcgtattggcgcgtgttttcacaacaaccggcgctgagtatgcctttgatctcagaggataaaataagaaaaggatgggtgttgatatgcagaaattagaacagttatatgaaggaaaagcgaaaaaagtctttaagacagaagacccggatattgtaattgtagactataaagatgatgccacggcatttaatggagaaaaaaagggaacaatcgtagggaagggtgtcatcaacaaccgtatgacaaactatattttccaggttcttgaaaaagaaggagtaccgacgcactttgtagaagagctgagcgacagagagacggcagtcaaaagagtggagatcgttccgctcgaagtgatcgtccgcaatgttgcagcaggaagcttttccaagagacttggaattgaagagggaacaaacttactggcacctactcttgaattcagctataaagacgacgacctcggcgatccgctcatcaatgattacatggcgatcgccatcggcgcgtccacaagagaagagattgaaaagatcacagaatatacatttaaagtaaatgaagtgctcaagaaattctttgcggaagcaggaattgagctgatcgactttaagatcgaattcggaagattccacggagacgtcatcctggcagacgagatctctccggatacgtgccgtctgtgggatatcaatacacatgagaagctggacaaggaccgtttccgcagggatatgggcaatgtggaggacgcgtatcaggaagtgttcaggagaatcggcataaaatagtaaggagcataaacattcatgaaccagtttgaacaggtcacaacaggaatgggagaagaatgtggtgtatttggagcctatgatatggatgggggcaatgtggcccccaccgtatattatgggctttttgcattacagcaccgcgggcaggagagctgcggcatcgcggtgacggacacatatggagaacggaaagtacgctcgaaaaaaggactcggtcttgtcaacgatgtatttgacggggagtctcttgaggaactgaaagggaatctcggagtaggacatgtccgctattctacagcagggggctccagggcggagaatgccatgcctcttgtcataaactatgtgaaagggacgctggtgatcgcccacaacggaaatctgacgaacgcgatcgagctcagacgggaactggaatacacgggcgccatcttccagacgaccatcgactcggaagtgatcgcctaccatatcgccagagagcgcctgaacgtaggaaaagcagaggatgccgtaaagaatgcgatgaaaaagatcagaggggcatacgcgcttgtcgtcagctctccgagaaagatgataggggcgagagatccgttcgggctgaagccgctctgtatcggaaagcgggacaatacgtatatactggcgtcggaaagctgcgcgctctcagcggtcggtgcggactttgtgcgcgatgtcgaaccgggagagatcgtctcttttacgaagaatgggatagagtccgaccggagcatggcgattcccgcggataaacaggccaggtgtatctttgaatatatttattttgcaagaaccgacagtacgctggacggagtaaatgtataccatgcgcgcatcaccgcaggcagggcgctggcaaaatcctacccggtcgaagcggatctggtcgtcggcgtgccggattctggtctcgtggcggcaaaggggtattcggaagagtccgggatcccatacggcatggcgttccacaagaacagctacgtgggccgtacctttatcaaaccgagtcagagcgagcgggagtcaagcgtgaagatcaagctcaatgtcatcgaggaagtggtccggggcaaacgtattgtgatggtggacgattccatcgtgcggggcacgacctgtgccaatatcattaagatgctgaaaaaggcaggcgcgttggaggttcatgtcagaataagctcgccgccgtttctgtatccgtgttattttggcaccgatgtgccgtccaatgagcagctgatcgcccatgcgcacacacccaaagagatacagaaaatgataggggccgactctcttggatatatggagatcgacaggctgaaagaaatggtgggagatctcgggtactgtgacgcgtgctttaccgggaattatccgatggaagtgccgggcagggatgtgtcgcaggcatttgaatagcctgtagaaggaagcggcaaatatatgttgattgacgaaaggaaaaaaattatgagtacagacagatatgtaagcccgttatcagaacgttacgccagcagggagatgcagtatatcttttctccggacaagaagttccgaacatggagacggctctggatcgcgctggcagagacagagaaggaactggggcttcccataacagaggaacagatcgaagaattgaaggaacatgcggatgatatcaattatgaagttgcaaaggagcgcgaaaagctcgtgcgccacgatgtgatgtcacatgtgtacgcgtacggccagcaatgcccgaaagcaaaagggatcatccatctcggggcaacatcctgctatgtcggtgacaacacggacattataatcatggcagaggcgcttgagatcgtgagaaagaaactggtcaatgtgatcgcggaactggctaaattcgcagatgaatacaaagcgctgccgacgcttgcgttcacacatttccagccggcccagcctacgacggtaggaaagagggccacactctggatgcaggaatttatgatggatctggaagacctggagtatgtaaaaggaagccttaagctgctcggttccaaaggaacgaccggaacacaggcaagttttttagagctctttgatggagatcaggagacgatcgaccggatcgatccgatgatagcggagaaaatgggcttcaaagcatgctgtccggtatcggggcagacttactcccgtaaggtggacacgagagttgtgaatgtacttgccgggatcgcggcaagcgcgcacaagctgtccaatgatatacgccttctgcagcatctgaaggaagtggaagagccgtttgaaaagacgcagatcggctcctccgcgatggcatataagagaaacccgatgagaagtgagcggatcgcgtcactgtcccgttatgtgatggtggatgcgctgaaccctgccatcacgtcagcgacccagtggttcgaacggacgctcgatgactcggcgaacaagcgtctcagcgtaccggaaggcttcctcgcagtcgacggcatattggatctgtgcctgaatgtagtggacggtctcgtcgtatatccgaaagtaattgagaaacgccttatgtcagagctgcctttcatggccacggaaaatatcatgatggacgcagtgaaggccggcggcgacaggcaggagctgcatgagaggatcagagaattgtccatggaggcagggaaaaatgtgaaagaaaaaggtctggacaacaatctccttgagcttatcgcggctgatcctgcgtttaacctgagtgaggaagaactcaaaaagacgatggatccgtccagatataccggacgtgcggcgctgcaggtggaggcatttcttaaagatacggcggccccggtccttgaggccaacaaagatgtgctcggaatgagcgcggagatcaatgtataagcggcagtaacaggacgacagcagttctgaaatgatgaaaatcagaagacggctgtccgggcgcaggcccgggcagccgctttttcttccgtttggaatgtccctatgtaatgcacgggaacctttggcatttttcacaaatcagtaaaatggaaagaacgtgaattcaatatgtaattttgaatattgaagaaaaatcaccaaaaattattacaaatgaagaatcctgttgcaattactttgttaataaattatcatagacttatcagataatacagttttgttatcggctgtatttatgagagaaggagggaattttgaatggagacattaaacaacattgtcctgacgattcagcactatcttgcggactacatactgatcgccgctcttttgctcggcggcatctggtttaccgtaagacttggctttatccaggtaagagggtttaaagaagggatgaagaggacgttcggcggactgttccggaaaaaaggcgaggccggagcagacggcatgtcctcattccaggcgctggcgacagcgatcgcggcccaggtcggcacaggcaacattgccggagcggcgacggcgctggcgatcggcggtccgggagcgatcttctggatgtgggttgcggcattcctcggaatggcaaccatatttgcagaagcgatcatggcacagaagtataaatgcgtcggtgaagacggagtggtgacaggaggtcctgtatactacatccgcgcggcatttaaaggcacgttcggcaaagtgctggcaggaatttttgccgtacttatcatcttcgcgctcggcttcatgggaaatgcggtacagtccaactctatcgcggcagcgttccgcacagcattcggcgttccacaggtggtcatgggaattgttatcgctgttctggcactcgccgtatttatgggcggtatgaagcgcattgccaaagtgacggagacgatcgtaccgatcatggcggcgctgtatatcgtgggagcattgatcgtgatcatctataactacaggaacataccgtacgcgttccacgcgatcatcgtcggtgcgttcagcccgtcctccattgccggcggcgcggtcggcgcgacgatcaagctggcgctgacaaagggtgtggcgcgcggtcttttttccaacgaggcaggtatgggctctactccgcacgcacatgcggtcgccaaggtggaccacccggtggagcagggatttgtagctatggtaggcgttttcatcgatacgtttgtagtccttaatcttacggcgctcgttattattacgacaaagtccattccgacaggcaagacgggggcagaactgagccagtacgcgttttccacattgttcggaaaaggcggcgatatctttatcgcggtttgtatgttcttctttgcgttttccacgatcgtcggctggtatttcttcgggcaggcaaatataaaatatctgttcggggcaaaagcggtcaaagtatattcactgctggtggcagcctgcgtcgtgctcggctcgcttgcccaggtggatctcgtgtggaacatggcggactgctttaattccatgatggtcataccgaatatcctcggcctgttcgctttgagcggagtgataaagaaggtgcacgacgactactataagaactttttaaataagaaataaaagtaaatatacataaaattgaagacggtttgttgtatgaaattaacaaatcgaactttctcatttgaaaaggttgaaaaaatattaacaataagttaatataaaaacaagcaataagatttattcattgcgtctataaataaaattaaacagcgggttgatttttttcaagagagagccgtacatatggccgccgaagaggcaagccggacagatgagggtgaacatctggcgggtgaaactttcaggcaaaaggactgggaaaaggaccgcattctgaatcttgtgttgaagtgtttagtaagcacgccaatagacagaaaggacgaattacacatctgtgtttaaatcgtcctttttttattctttgccggatggaatgtgttttttggaaaattcagcagttcggtgagtaaaatatccagatcaaaagaggtggatgagatgcagaatcgttacataataataaccaataatccactcgtcccggagaagattggcggaacacacaatgtggagtacaaagagatctcctacgaggaagttctcaggacagtcagagacagaatacatgaagggcacacgcttttatcacatcccctgtcggggagtgtaaagcctaatgaaacaccatataaatcaatcatgctgtcggcaggaaagggggaggtggacccggggtcggtagttatcattgaaaacgccatagaggcgtgccggaagtttgtgtttaagtcagacaaatacaaacctgaggtgtacgatgattttcagatgatagactggactctactggaaagtgcgatcacatcggcggatgtaatgtaaggtatgcgagaggttgtaacaggcgaaagcttcaacaaataacaacatttaacttaaggagggaacaatacgtgaaattagaaatgggacacatatacatcaaggatattcagtttgcagcagaatccaagatcgaagacggaatcctttatgtatcagaagaggctgtaaaggcagttgctcttgaagatgagaagatcaagagtgtatcatttgacattgcaaaaccaggagagagcgtgaggatcacgccggtgaaggatgtcattgagccacgtgttaaagtagagggaaaagggggaatcttcccgggcgttatctctaaagtggatacagtaggaagcggcaagacatacgcattaaaggggatggcggttgtcacagccggcaagatcgtagggttccaggaaggcatcatcgatatgacaggccctggcgcggactatactccattttcaaagacacttaaccttgttatggtatgtgaaccggtggacagcatcaaaccgcacgattatgaaaaagcagtaagatttgccggcttcagagttgcggtgtatatcggagagctggcccgcagccttacaccggacgagacaaaagtgtatgagacatacacagtcaaagaaggcatggagaagtatcccgaccttccgagagtggcgtatgtacagatgctccagagccagggacttctgcacgacacttacgtgtacggcgtggacgcaaagaaagtgcttccgacgatcctgaatccgacagagatcatggacggggctatcgtatcgggcaactgtgtgtccgcatgcgacaagaaccctacttatgtacatctgaacaaccctgtcgtacatgatatgtttgaggagcacggcaagacgatcaactttgtatgccagatcatcacaaatgaaaatgtatatcttgcggacaaacagcgttcatcagactggacggcaaagctgtgcaagatgctggatcttgacgctgtgatcgtatcacaggaaggattcggcaacccggatacggacctgatcatgaactgtaagaagatcgaggctgagggtgtcaagacagttatcatcacggacgagtatgccggacgtgacggaaaatcccagtctctcgcagatgcagacgcagctgcagatgcagttgttacaggcggaaacgcaaaccaggttattatcctgcctaagttggacaaagttatcggaactcttgactatgtgacaaagatcgccggagccagcgaagaaacgctccgcgaggacggttccctggaggtagagcttcaggtgctgacaggagcaacaaacgaaactggtttcaacaaactgagcgcgagataataagggaggatacagtaaatgagcaaaattaaagttgtacattacatcaatcagttcttcgccaacatcggcggggaagaaaaagcggattatccggcagaacttcgcgtaggtgaagtagttggaccgggtatggcgtttaacatgaattttaaagatgaggcggagatcattgcgacgatcgtttgcggagattcttacttcaacgagaaccttgaaaaagcaaaagcagatattcttgcaatggtaaaagagcaggctccggatgtgtttatcgcaggaccggcgttcaacgcgggccgttacggcgttgcatgtggcactattgcggctgcggttcaggaggaactgggcattcctgcgatcacaggtatgtatgtggagaatccaggtgcagatatgttcaaaaaccaggtatatatggtctctacaaagaacagtgctgcaggtatgagagacgcagttgccaagatggctcctcttgctcttaagcttgccagaggtgaagcagtcggcgcttcctgtcaggaaggttacatgccgaacggtgtccgcgtaaatttcttcgaggaagaaagaggttcaaagagagcggtaaacatgctgcttaaaaagcttgcagacaaaccatttgagacagaatatccgatgccgaactttgacagagttgatccgaatccggccataaaagatcttgcacatgcgaagatagcacttgttacctccggtggtatcgtgccgaagggcaatccggaccatatcgaaagctccagtgcgtcacattatggagaatatgatattaccggcgttatggacttgacagaagagacatatgagacggcccacggcggatatgacccggtatacgctaatgaagattcagaccgcgtactccctgttgacgtactccgcgatatggagaaggaaggaaagatcggagagcttcatcacctgttctacacaacgaccggtaacggaactgcggtggcatcatcgaaagcgtttgccgctgagttttcacagaagcttctggccgacggtgtggatgccgtaattctcacctccacttgaggcacctgtactcgttgcggtgcaacgatggttaaagaggtcgagagagcaggacttcctgttgtacatgtatgtacggtaactccgatctccatgacagttggcgcgaacagaatcgttccggctatcgcaattccacatcctcttggaaatccggctctggataaagatgaggagaaagcactccgccgccagatcgtagagaaagcacttgatgctcttacgacagaagttgacggacagacaatatttgactagagcatctgacgaggtctttcggacccggtgcagaatgatgtaactttagtaataaaggagaaatagcaaaatgagcaagatttatgatgttattatcctgggtgcaggtcctgccggtttagcggcaggactgtatgcaggaagaagccgcctctctactcttatcatagaaaagggccaggacggcggacagatcgcgattacagatgagatagagaactacccgggtcagatcgtggatggtgagtccggtccgtctctcatcgcaagaatgacggagcaggctgaaaaattcggggcagagcgtatatctgatacgatcacagaagtacagcttgacggcgaggtaaaggtattaaagagcgcaaaggcagaatatcaggcaaagaacattatcattgccacaggcgcttattccagaccgatcggctgcaagggcgaggctgagttcatgggcaagggcgtgtcctactgcgccacatgtgatgccaatttctttgaagattttgaagtgtatgtagtcggcggcggagattccgcggttgaggaagctatgtatctctctaaatttgcaagaaaagtaaccattatccacagacgtaatgaacttcgcgccgcaaagtccatccaggaaaaggcatttgccaatccgaagatcgatttcttctgggacagcgtggttgaggaaatatatggggatgacattctccagggaatgatcgtcaagaatgttaagaccggtgagacccgcaaagtggaggcggatccggaggacggaatgttcgggctgttcggattcatcggcacggttccgaattccaagctctttgaaggcatcgtagagatggatgagagagggtacattaagacggacgatgacatgcatacgaatgttccgaacgtatacgcggccggagacgtccgcatcaagagcctgagacaggttgtaactgcggcggctgacggcgcgatcgcagcggttcaggtggaaagaagcttatcagattatttttaggaggtagagatcatgatcgatgtaacaaaggaaacatttgaagaagaagtattaaaggctgaaggatatgtgtttgtagacttttacggcgacggatgcgtgccgtgccaggctctcatgccaaaggtacacgaattcgcagacacatacggggacaagatgaaatttacatccctgaacacaacaaaggcacgccgccttgccatcgcgcagaaagtattaggacttcctgtaatggcagtatacaaagacggtgagaaagtggaggaagtcgtgaaagatgacgcgactccggaaaatatcgaggcgatgatcaagaaatatatctaatttaagatagttttctttatcataaattcaactagcaacatacaagaaaggagaaagcataattatggctattttagaaggaaaaaaagcaataattatcggagaccgtgatggaattccgggaccggctatcgctgagtgcgttaagactgccggcgctgaggtagtattttcatccacggaatgtttcgtctgaacgagcgcaggcgcaatggacttagagaatcagaagagagtaaaagaatttgctgacgaatatggtgcagagaaccttgtagtagttctcggcgctgcagaaggtgaggcttcaggccttgcagcagagaccgttacagcaggtgaccctactttcgcaggtccattgacaggggtccagcttggactcaaagtatatcacgtttgcgaaccagagatgaaagaagagttcgacgaagaagtgtatgatgagcagataagtatgatggaaatggtacttgatgttgatgatatcattaacgagatgacagccatcagagaccagttctgtaaattttaagtgtgtggggtggtgtcaccccaccaccccgtatatttaaagaaaggtggaaaaccaatgaacagtgtgatcaaaggggccagttatgtgttggtacatacccctgatatggttttatataatggaacgactcagacaactgagaagatcgtcaatccggattcggattatttaaaagaagtaccgaaaaatctccgctcctacaaagaggcggttgagtattggccgaaccagacatatatcggcaacgtacatccggatgaattagcagaggtagagttcccctggtatgacaagaaaaaagagggagctgaccgttttggcaaatacggcgagatcatgccgcaggaagaatttctcttccttgtacaggcaagcgatatgtttgaagtcgtaagacttgacaaagaatttgtcgctcggtacaaagacgcgtttgccagcaatcctgtcatctctgaagatatcgttgaaaagatccacgagggtgtcgatatcagcgagatagagcattttgtaagcgaagaacatgcagaaggattatatcacgatggaaaattagtaggctgtgtaaaaagagcccatgatattgatgtaaacttgtccgcccatgtgatgcatgagaaccttatgagcaaggcgtccagtgttctggcactgctccatgcggtacgcaatgcaggcattgagaaggcggaagtagaatatgtgatcgactgcgcggaagaggcgtgcggcgatatgaaccagagaggcggaggtaactttgccaaggctgccgcagaagttgcagggcttgtcagcgcttccggttctgacgccagaggattctgtgccgcgccggcgcacgcagtgatcgaagctgccgctctcgtaaaatccggggcatacaagactgtagttgtcacgtctggcggatgtacggccaagcttggcatgaacggcaaggatcatattaagaagggtcttccgatcctggaagactgtctcggaggctttgcggtagttatctctgagaatgacggagtgaatcctgagatcgatctgaatatgctcggccgccacagtgtgggcaccggttccgcaccgcaggctgtgatcggaagtcttgtgacagactcacttgacaaagcggggatgaagatcccggatatcgacaagtattcaccggagatgcagaatcctgacatcacaaagccggcaggagcaggtgatgttccgcttgcgaactacaaaatgatcgcggctctggctgtaaagcgcggagagctggagaagaaagaacttgccgcatttacaaaagaacacggccttaccggatgggcgccgacacagggacatattccttccggcgttccgtatatcggatttgcgcgtgaggatatcctcagcggcaagatcagaaatgccatgatcatcggtaagggaagtctgttccttggaagaatgacgaatctttttgacggtgtatcctttgtgatccacggcaacaccgctgaggcggaaagcgcagcttcgggagtgtcagaagaggaagttaaaggactcattgcgaaagctatgaaagattttgccgcgaccctgatggcagagtaaggggtggtgaatatggcagataatattgaaaaaatgattgcctccacctttatggagatggcagaaggtcttgagaccggaagttttggaaagaagccgaagatcgcgctgacaggcatgggaagcgaacatggggaagagaattccatcgcggcagcggcggcagcggcaagagaaggtatcgatgtatattatatcggtacgctggaagcagaaggtgttacgacagtcaaagtggccgacgaagacgaaggccataagaagatggaagaactcctgaagaataaggaagtggacggtgcggtgaccatgcactttccgtttccgatcggtgtatccactgtggggcgtgcgatcacaccgtcaaaaggcagagagatgtatgtcgcgacaacgacaggaacgtccagtgccgaccgtatcgaaggaatgatcaaaaatgccatctacggtatcatagcagcaaagacatgcggaaatgcagatccgacagtaggtatcctcaatgtggacggtgcccgccagacggagatcgctttgaagcagttaaaagaaaatggatatgacattacatttgcggaatcagccagagctgacggaggatgcgtgatgagaggcaacgacgtgctccagggctcaccggatattatggtgtgtgattctctgtcgggaaatattcttattaagatgctttcctctttcacaacagggggaagctatgaggcatccggttatggttacggccctggaattggagaagggtacgaccagcttgtgatgatcatttcccgtgcttcaggggctccgctcatcaccggggcgatccgttatgcggcgcagcttgtcagaggcaaggtgtttgaggtggcaaagaaagagtttgaagctgccaacaaagccgggctgaaagatatacttgccgccagaaaagcgtctgaaaagcagacgggagattccgaggaagtatcagcgcctccgaaagagccggtcacatcccagatcgcgggaattgagatcatggaccttgaggacggcgtgaaagcgctctggaaaattggtgtctatgcagagagtggtatgggctgtacaggaccgatcatccttgtctcagatgcaaatcttgcgaaagcagaggaagaactcaaaaaagcgggatttattaattagatcatcccttaaaaccaccagattgttttataatatggaaaagtggcatcttgcatgtggcgagatgccacttttcatttcttctttccatgccttataatgaattgaatgtgaggtgttaatagtggaagatgtattgacattacggacagtgggaaggagaaccaggatctcagccggacatattactgcggtgatccttctcgtactgttcgtatgctgtctgtatattatcggtctggaacaggcggtgccggggacggtttcctccggcctggaaaatgtagaagacacggatatacagatgcccggaccgcgtccaaaacagcctgatgtaaaacctttcaggcggatcctggaccatccggaagagataggcattgtgattcttcctggaaaagaaccggcaaaagaccgtgtgaaagatatggcggctgcggataagctgaatccggataaagccggttcgtaggacaggccggtcacagttccgggaagttcagcagcagaggaggaagtaccggatgacggcaccggtgtttcaatatctgtacatgtgacgtttcatggaaacggaggcacgctgtccgtgacggaaatgacgctggaggaatattatctggacctttctgcgctggaaaatccgagaagacttggcaaagaatttgacggctggtatatagatccttcgtgtaccaccgcgtttaccggcatcgaggaaggccagacgagggtggacctgtacgcgggatggaaagagatcactacttatatatgcgacgacagaggctatataaccggatacagtgacgcggccgcggttgcggatgaaggcaccattatcctgccgaattccccggactgtctcggagtggaggcaggcgcttttgccgggctggagtatgagatatttgaagtgttcattcctcccaacataacttatatcgcgccgggagtgctggaatcatttccctatctgatgtacatagaagttatggccgggaacccggcattttacagcgacggaggcgtactttataaagcagacgggacactttacgtctttccggcgggaagaggcaactggggagcaggtgataatgattagttctgcatgagtggacaggaaagagccggcggccggaaatgaccgccggctcttcaaatttggattttgtgaaagattctctgtaatttttgcgccgctggtgatataataggctggatcaaataattgcaggggaaatatgtatgaatatcagacagatcacagaagacaaaaaagcatatttggatctattactgctggcggatccacaggagaacatgatcgagcgttatcttgacggcggagagatgtttgtgctgtgcgaccgggagcaggtaatgaccgtggcggtggtgtccgtgctgaagaaccggaaatgtgagcttaaaaatatagcgaccagacccgaatatcagggcagagggtatgcgagatatatgatccactacctgtgtgagcattacagcaaccggtgcgacacgatgtatgtcggtacgggcaactgtgccaagagcatagggttttatgagaaatgcgggtttgtaaactctcatataatcatgaacttttttatagacaattacgatgagccgatatatgaagacggaaagctgctgacggacatggtctacctcaaaaagtatcttgattctgaagtggatgtaaagaaggtagtgaatctggcccttgaagcgggacggatacttctgaaaaacggcggtgagatcttccgcgtggaagagacgatcacgcgcatatgcaaccgattccatgtggaaaaagtcgatatttttacgctgagccacggtatatttgtcagcgctgaaaatggggtgcaggaggcttacacgaaggtgaagcacgttcctttgtcggcgccgcaccttggcatcgtagcggaagtcaacgatctctccagagaaatctcggccggccgggtcggtgtggatgaagcgcttaagaggctggaagagatcgatcatatgccgcccaagcgcggctattttcagatactggccgccggagccggaagcggtttcttcggatttctgctcggggcgtcggcgcttgagagcgtgatcgctttctgcatcggctgtctgctttatatgtgggtactcgccggtaagcggcatcatatgtcaaagatcatcataaatattgccgggggcgtgatcatcactgcattggccatagtggcagtgcatctgccttttccggaaacagtcaggctggaaggtatgatcatcggttctataatgcctcttatcccgggggtcgcatttgtcaatgcgatccgcgatatcgcagacagtgatttcctctcaggcacggtgcggatgatagatgctctgctcgtgtttgtatatatcgccataggagtgggaatcacacttagtatctataataatatgttaggagggctggcgctttgatacacgacatatttatgaatgtagtctgcccgtttataggaacgatcgcgtacgcggtgctctttaacgtaccgaagaggtattacttaagctgcggcatgaccggaacggcgggatggcttgtgtttgccctgtcaggcgcttatacgtcctcagcggtagcggcgtttctgggggcgcttgtcgttgtcctcatctccagaatgctcacggtaaagatgaaatgccccattacagtctttcttgtatcaggtatctttccgctcgtgcccggcgcaggtatctattatacggcctactatcttgtgacgaaccagctgtccctcgctgcccagaaaggcctggattccataaagatcgcgtttgggatcgtccttggaatcgtgtttatcgtctccgtaccgagagaatttttccaagtccgttactggaaggaaagaaggaccggaaaaggttggagcaaataggaaaatatggtacaataaaagtacgataaacggcaggagggagggcaagcatatgttaggaaagacattattggatatattgaaggagagcagatacacgacagttttaagcggatttggaatgctgctggaaagtggatatccggccatcagggacggggatgagtcatacgacgttgaactgaagtacggttattcagtggaagagatattcagcagttctttctattctacaagaaaagaacagttctatgaattttaccgcagcgagatactgaagatgctggaaaagccgcctggaaaatgcttttatgagatggcggaactggagaagagaggtcttatccagtccgttatcacgagacgtatctacggacttccgcagagggccggctgtaaaaatgtcatcaaccttcacggcagtgtgtatgataactattgtccgcactgtggtaaggaatatcctgtagaatatattgtcaattccgcaaggattccgctctgcgaagtgtgcagtaccccgatacgcccgagaatatgcctgtttggagagatggtcgacaaccgtatcatcacaaaggcggcggaggaggtcagaaaggcagatgtgctgctcgttttggggaccaatctgaagacctatctgtgcagccagctgatcgactactatgaaggcgataagctcgttctgatcaatccggaaaagcatttttcagataagcttgccgatgtggccgtacataagagtgtggaagacgcactcggagaaatactaaaagaattaggagaatgatcatgagtaaagtaagaacaagatttgcaccgagtcctaccgggagaatgcatgtaggaaatttgagaacagcgctctatgcgtatctgatagccaagcatgaaggaggagactttatgctcaggatcgaggatacggatcaggaacggtttgtggacggtgcgcttgagattatttaccgtacgcttgagaagaccgggctcattcacgatgagggaccggataaggatggaggagtgggcccttacgtacagagcgaaagaaatgcctccgggttatatatgaaatatgcagaacagttggtcgagcagggggatgcgtattattgcttctgtgacaaagagcgccttgattccctgaggagcagggtgtcggaatccgggacagagatcgtaacgtacgataaacactgtctgaacctcagcaaagaggagatcgaggccaaccttgcctccggcaggccatatgtgatccggatcaatatgccggcaaaaggcacgactacgttccacgacgatatatatggggacatcacggtgccgaatgaggaactggatgatatgatcctcatgaagtcagacggctatccgacttataattttgcaaatgtgatcgacgatcatcttatggggatcacccatgtggtgcgcggcaatgaatatctgtcatccgcaccgaaatataaccgtctgtatgaagcgttcggctgggacgttccgacttatgtccactgtccgctcatcacggatgagaaccataaaaagctgagcaagcgctgcgggcattcctcctatgaggatctgctggagcagggatttgtgtcagaggcggtcgtcaactatgtggccctgcttggctggtgtccggaggataaccaggagattttttcactggatgaacttgtgaaggcatttgattaccggcatatgagcaaatctcctgctgtatttgatgttgtgaagcttagatggatgaacggcgaatatctgaaggccatggactttgacaggttttatgagatggcagagccttatatcaaagaggtggtcacaaaggattatgatctgaagaagatcgcggctctggtaaagacgaggatcgaagtatttccggatatcagagaacagatcgacttctttgaggaacttccggaatatgacacggccatgtactgtcacaagaaaatgaagacagatgaagagaagtctctggaggtactaagcgatatcctgccggttcttgaggcgcaggatgatttcagcaacgatgctctgtttgcggcgctgaaaggctatgtggacgcgaagggctgtaaggtcggattcgtgatgtggccggtgcgtacggcggtgtccggcaggcagaacactcccggcggcgccacggagatcatggagatactcggaaaagaggaatctctcagaagaatccgcagaggaatcgaattattaagcagataagaggtatatatggggttaaacagtgctcaaagtaaggcggtcgcccatcacgacggaccttgtatggtcctggcaggtcccggttccgggaagacactcactattgcaaagcgaatagaatatctgataaggaagcataaggtaaggccagaagaaattctggtcattacctttactaaatatgcggctaatgagatgaaaagccggtttctggccgtaatgaaggagccgcttgcagtcaccttcggaacgttccacggcatttattacggaatactgaagtgggcatatggaatcggacagagcaatctgctcacagaggaggagcgttacaatcttctgagacagatcgcttccgcgtcacatacggacgaagcgctcacagaggaagaggagaaggactatttaaaagaactggcggcggagatagggaagataaagaatgaccgtctggatatccgcgcgtatgagtcggagaggttcggcaaagaacggttccgaagcatataccgcgattatgaggatgcgaagaaaaagtggaataaaatagattttgaagacatgctgctgctttgttgccagctgtttttggagcgtcctgatgtacttgaaaagtggcagcagaaattccgttacatccttgtggatgaatttcaggatatcaaccaggtgcagtatgatgtgctgcgtatgcttgcggctccggaggacaatctttttgtcgtgggtgacgacgaccagtctatctatggattccggggggccaggcctgggatcatggcggagttcaaaaaagattatccgcaggccggccagatactcctggacgtcaattacaggtctacttcccatattgttaacggggcgctcagagtcatcgggcataataagaagagattcaggaaggcagtccgttccgggaagaaacagggggagacggtccacgtgcaggaagtaaaggattctgtagaagagggcgcgtatgttgtggaacagatccgggagcttgtacggcaggggatccccttaagcgggatcgctgtcctgtaccggacgaacctggacgccagggcgctgtcggagtgcctgatggaatatcagatcccgttttgtatgaaggagtacatggataatatatatgaccactttatcgcaagagacataagcagttattttcatcttgtgctcagagaattcgagcgcacgtatttcctgcagatcgtgaaccgtccgaaccggtacatcggaagggacagtatgagcggggaaccggtgacgtttgaatcgctccgccgtttttactgtgacaagcaatggatgatggaccggatcgaccagatggagtgggacataaagatgatggagaacaaatctccgtatcttgcgatccagtatatgagaaaaagtatcggctatgacgaattcctgaaagactacgcggcatacagacagatcccggcagaggagctttttaaagtgctcgatgagatacaggaactctccagaggctccgggacgatcggtgaatggttcgcacatgtggaaaaatacggggccatgctgaaagagcagagaaagaaaagcagagagacaaaagagagcgccgccctgatgacaatgcacggctcaaaggggcttgaatacgacacggtattcattatccagggaaatgaaggggtagttccttacaaaaaggcaaaaacagaagacgagatagaagaggaacgcagacttttttatgtggctatgacgagggcaaagcggaaacttattatcagctacgtgaaagaaaaaaacgggaaagaagcagctccctcccgttttgtaaatgaattattcctcaatgtctgattcgtcgaattcctgtgtgtccagccattcgtcaaatgcgtctgcggcgatctcatattcatcgtcatcttcgatattctccagttccggttctcccggagctgtttctttatagcggtaaatgtaaacatcgccctcttcgctctctccgttttcgtccagcggaaggagcgcgatatattcattttctccagcctcataaatggtgaggatcgcacaattcaccacttcatcattatcaagagtcaaggtgaccataggtgcttcgtcatgtccgcagcagtcgtcatgtccgcagttgtgttgctgttcgctcatagttttatctccttttatatacctaatagttatcttagtttcaagatacttttactgtaccaaaggaacgtacaaaaagcaagggagtttttgccaatggcgggcacatgtgaaaagtgtagccaaaacagcgaaaatggtgtaaaatatatctgtgcgtttgaaaaaataatgcataaggaggataaaatcttatgatgaagaggagaatgttaagtgttattgcggtgctgcttatctgcatattcgcattgtccggctgtaaaaagaatgtaggtacgccggaagacaatgcggtgaaagatgaggaagccgatgaagatacagacggagaagatgaagatgcatacgtgttcggcttttccgttattgatatgcagaacccttattttataacgctggagggcgcaacgagagaggctgtggaaagcgggggctaccgtatgatcacgaaggacccggcttcggacgcggcggcgcaggcagcacagatccaggagatgatcgccgaaggcatcgacgcggtctttctctgtccggtagactgggaagagataacggactcgctcaaggcgctgaaagatgcgggggttaggataatcaatgtggacagccaggtgaaagagatggagtacgtggacgcctacataggttctgacaaccacaacgccggatttatatgcggggaagatctgatggagaagcggccggacggtgggaaaatcgccatcctggaatgcccgagccagaactcggtcaacgaccgtatcacgggatttgaggaagctatcgcagacgcggaaaagggatttgaagttgtggcgagagaagacaccggcggtgagtttgacagggcgctcgaggcggccgaaaagatcctgaaggaaaacccggacattacggcgatcatgtgcggcaacgaccagatcgcggtgggcgccatgacggcggtgaacctggcaaaaatggaagacgtcatcatttacggcgttgacggctccccggatataaagaaagagtttaaaaaggcaggctgtcagatcgccggaaccgcggcccagtctccgataaatatgggaaagacggcggccaaaacagggatcagtattctgaagggcgaagaattcgagcgggaagtatacgaagaagtatttatgataaacaaagataatgtggatatgtatggagtagatggctggcagtaacaggaagggcagaatatgagagcagttgaggggaaaccattgccgttgggcgttacaatcacagagagcgcagttaatttttccgtcgcggtgccggagggcaggacatgcagtcttctgttatatgaaccgggaggctgtgagccatactggtcggtaccgatggagcagtccgccggtgaggtgcgttttaccgcgctggaaggtatagaggcaggcggcctggaatataattatatgttcgatgaagagatcgtggttgacccttacgcgggggcgctcgccggcagaagtgtatggcacagagagtgtgatatacagaagcatgaggtgcgggggatcgtccggacagaaagttatgactgggagggggatacaccacttcacattccgtataatgaagtgaatgcttacagtcttcacgtacgcggctttacaatgcacagttcatcaaaagcgcgccataagggaacgtttgccggggtggcggaaaagataccgtatctgaaggagcttgggatcaaccagatccactgtatgccggtctatgagtttgaggagcgcatgcagtacacgaattactggggatatggagacgcgttcttttttgcaccgaaaagcgcctattctgtttccggcgacggtgtgagtgagctgaaggatatggtgaaagcgtgccacaaagccggcattgaagttgttctcgagatgccgtttacggataagacgccgaagcagctgatggtagaatgcctccgttattatatgctggactaccacattgacggctttatcctgaacccggcggtggctccgatggagacgctgtacggggatcccattctgaaaaaaacgaagatcatgagacacgacatgggctttcagactgttatgcgccgtttcctgaaaggagacgagggcatggtgggagaggttatctactggcttagacacaattcccgtccggacgggatatttaacagtataacctgccacaacggattcacgctcaatgatctcgtatcttacgacgggaagcacaatgaggcaaacggtgaaaataaccaggacgggccggattataactacagctggaactgcggggcggaagggccgagcaggaagaaggcggtgaatgaactgcgcagaagacagatgagaaatgcgttctttctgctgctgctcgcacaggggacaccatgtattctcgcaggggatgaatttgccaattcccagaaagggaacaataatgtctattgccaggataatccaaccggatggctcgattggaataaggcggcaaaggaacaggaactgttccattttgtaaaagaactgatcgctctcaggaagaagcatccggtcctgtacccgccgaaagaggcagaaggtaccgatatgctctgctgcggcatgccggacgtatcgtaccacggggaaaacgcgtggaaggtgccttcagaagtatccagccgtcagttgggagtcttttattacggggcatatgcggacgacgaggactgctttgtcgtctataacatgcattggcttccccacacatttgcgcttccgtctcttgcgaagggaaggaagtggtatgtggccgcctccacggaggacggcgtactggcggactatagatcattaaagaaccagcggctcctggaagtgaaggagcgtacagtgatattgctggcggggcggtaaatatggaatggattcgtaataaaatcgggctgacgtcgtttcagctgaagtgtatcgctatcatatccatggtcattgaccataccggagcgatactgtacccggacgagatgatcttccgttatatcggccggatcgcttttcccatcttctgttttctgcttgtcgaaggattctgccatacgggcaatgtgtaccgttatatgagaagaatgcttgtatttgcctttgtgtcggagataccttatgatctggcgtttcagggcaggatactggaatttggccatcaaaatgtgttcttcacactgtttctcggcgttatactgatgtgggcgctgcagagggcgggagagtggccggagaaagccgcggaaatagtgcttgtaatgtggatcgccggaatcctcaagacagattacagctatacggggatcctgctgatcgcggtgttctatctgcttagagacgggttatggataaagcttgccgcgggtacggcatggtgttttatctggaacggttttgtgcagaaatacggcgctctggctatgattccggtcgccctgtataacggggagcggggaagaagcatgaagtatttcttttatgcgttttatccgctgcatctgctcatactgtatgggatcagcagatggatgatatagtttagtacgtggaagtggagtaagaattatgaaagcatggcagcatttttgtacgatcaatcaccataagatgctggtgatgaaacaatgttttaaggttggactgtataagcagggtctgctgcacgatatgtcaaaatatacgccttcggagttcctcgtgggctgcaaatattaccagggaacgagaagcccgaacaatgcagagcgggaagctaccggatattcttccgcgtggctgcaccataaagggaggaacaggcatcattatgaatactggatcgactacagtgccgatccaaaagaggggatcgttggccagaagatgccgacgcggtatgtggtagagatgttcatggaccggatcgcggcgtccaagacttatatgaaggaggcctacacagacgcccatccgctggaatattatgaaaagggagctgcaaagctcggcaggatgatccataaagatacggcggcgcttctccatcatctgctgaaaatgctggcggaagaaggcgaggagaagacatttgcatatataagaaaagagatcttaaaaaagaaaagaaaagggaagcagcggtaaaaattccgccgcttcccttttttagccggcgctgttcttgagactcaggctccattcctccacatagtcgagaaacttaagtgtggccggtgtgggcggcgcgtctttcggacaggcgacgccgagtatgcgggagtaatgctccgtaaatgaacgtgtgcacacgtcaaaaggcgcattgtacaggaggagccggggcagtatcgtgatgccgaaccctttttccaccattttgagcgtggcaaagtcttcattgagcctgtagcggatcctgggctttatgtcattcagtttaaatatattgccggtctcatagtcaagcccgtcagaggaaaggacgaaattttcgttattgacgtccgtcagagacacagctatcttttcagccagcggatgcgtcttgggagtcacaagcatgagctcgtcgtttcccatggggataaagggcagctccgggacgctgtagcgggatacgaagatgcagtccagcctgccggcctgcagcatctctttcagcgggttaaagccgtccacagtcatctcaaaacgaatattcggatacagcccggaaaattgctttaatatatcaggaagccagtggtaggagatgctctggatcgtgccgatgcggatgtaaccgctgtccaggctggtgaggtttgcggcgatctgccggatcttcttcttttcccggcagatgactttcagcgacgcaatgatctcctccgtgttcggcattagctccatgccgtgttttgaacgcttgaacaggggaaaaccgagttctttttcaaaattcttgatggcctggctgatggcagactgggtataattcaggctggcggcagttttcgatatgctgtgagtgtcgcatacgcttataatgatttcatatttattcatggcggctcctttatattagtaattttaaagtctctgttcacaactgcttaagtccggaacgaaaaatacgccttttcttcaggtataagagaaattgaacatagccttaagtaaagctggcttttatatcgggacttgttcctatattataaacataaatgataaattattgtcaagcaagttataaacagaagcaataaacaaatgtaaggaggaatcatattatgggaacagaattctggaacggggcggaagcagcccacagaagagtgatgatgaaggcagccggctattctgacaaggacatcagaaagaagcctcatatcggtgtgccgaattcttatatggcaggttctccggggtccgcacatctgcgtcagatcgcggaggctgtgaaagaagggatctgggcggccggaggcgtcccggtagagttcggcatcccggctacgtgcggcaacatcgccaacggcgctgaggaactgaaatacgagcaggtaggccgtgacatcgttgcgatgagtgttgaatttgtcacgagagtacataactttgacggtctggcaatgatcgcatcgtgcgataatatcatcgccggctgttacctggccgcaatgcgtctggatatcccgtccatgatcgttacaggaggatctatgcagcccgggcagtactgcggcaagacggtggtggaggcagatctggatgccgcgcgtttttccggcgcagacgaggaggcgcttatggacatggaggacaatgtatgtccgtccttcggcgcatgcccgtccatgggaacggccaacacgatgcagatgctcggtgaagtgctcaatcttgtccttccggggacgtctacaataccggcatccgacaatgccaagctgagaaaggcgagagaggcaggcatgtatgcggtggagatggcaaaggcagggagaaagccgtccgagctcatcacaaaagaagtgctgctcaattcaatcatgttcgatatggcggttgcgggttccaccaacgcggtgcttcatattctgtcttacggctatgagcttgggatcgaacttacgttggaagactttgagaaatatgcaaaagagatcccgtgcatcaatgcggtcgtgccgagcggtccgtataccgtggtggatttccattatgccggcggtgttatgaatgtgatgaaaatgctggagagcaagctgtttactgacgtgccgggcatgtacggaacttcctgggcagagatgctcgcgaaagtgaaacctcaggaaaacaaagtcatacattctctggagcgtccgctgtcccaggagccggggcttaagatactgaggggaaatctctcgccgaacggcgctattgtacggccgactgcggtgtatgaagaagtgaaatacatgaaaggcaaagcgaaagtattcgagggagaccgcgccgcgtttgaagctatccaggccggcgagatcgtgcccggtgatattattgtcatccgttatgagggatgcaagggagctccgggtatgaaagaactgatgctcagcatagacgccctgatcggactgggactgcacaaaagtgtaggactgatctctgacgcaagattttcaggcttcaacttcggcgcgatcatcggtcacgtgtctccggaagcttacgacggaggcaatattgctctcgtggaaaacggcgatgagatcgtcatcgatattccgggaggagaagtatccatgcttgtatcggatgaggagctggaaagaagaagagaaaagtgggtatgcccgccgctcaaagaagaaaagggctgcctcaacatttacgcaaagatgtgccgtccggcagaagaaggcggagcaatgcagccgtgggggcttgatgccagattcaagaggtaatgcacagtcgttccggggacatccgagagggggtgtccctgggacggatcaccggatttccctgtttccgggagcgggcagaaagcggaaaataaaaagataaaaattttgaaaaaatttgttgacatttaggccaagtcatagtaatatattcttcggacggtttaagtcatgcggaagtgtcggaactggcagacgagcaagactaaggatcttgtgagcaatgcgctcgtgtgggttcaagtcccatcttccgcagtttgttgaaaacaccggataccacgatatcagtggtatccggtgttttttgttttgaaatttatataggcagcataatgaagaaactatttcgggagtcagctttcattggatagctgagggacgctggaaataaaaatatttggagagcttggaaacaggctctcttttttattatgcttattttggcgccatttgggtcgataatcatatagtatatcacaatctgataaccggctggactttttttacaaggtaagaataaaacggcaggtacggggaggagtttggcgtatggaagttttaaaatcattgtcagaagaaaatttacagtctaatatagagtccagcatgtttataatggaacttggcagcgaaaaatgtttctggtcgaaaggttttttactggcaatggagcctccgaaaaagaatgagagcccggaacattttttcgcctccgttttacatgaagacgatatcggccgttttatgcgggattaccgtaagatcgcagacggaacgttttgcagctgcgcaaattcataccgtatgagggatatgggcggatgttatcagaacatgagcgttaagctgtggacggcaggtgaagattgtacggaaacgcgtaagtacctggcgggcatcatagcagaggcggacaattacggcaatcttgatccggtcacgttgcttcccaacaattacagtttcagaaaatatttgtatgaggaagtgaagaaaaaggagaactgggcggtcatcatgctcggtatcgatgattttaccaatataaacgaacttttttcttattctacggggaatctgctcctgcaggattgtgccagacgcatacagcagcttctgccggacaatgccggcctgttccggctggacggggacggctttggcgtcgttttgtacggctgtgatgaagagggcgtgaaggcgtggtatgaagaactcaagaaaagctgcataacagagaagttcaatgccaagggatacaaattctttctgaccatatcgggcggttcgtgctgcttcccaaaggatgggaatgactttgagactatttaccgcaacgccagcaaagcgctgcagacgtccaagaaaaacggcaagaactgccttgtagtctacagtgaggaactggctgaaaaggacaggcgcaaggcaacacttttgtctgctctgcgggagtctgtcgtgctcggttttaaaggattctatatggtatatcagccgatcgtaagcgcggagaaccagacgctggtcgggagtgaggcgctgctgcggtgggacagtccgtattttcccgaggaggagatatctccggttgaatttattcccgtgctggaggaaaacggcctgatgctggagacggggagatgggtgctggagaccgcaatacggcaatgtgccgaatggtgcagatacaaaccggattttcagatgaatattaatgtgtccagtcttcagtttgaagtgccgtcatttaaatacctgttaatggaaatgctcacggaatatgaagtgaagccagccaatataaccttggagctgactgagagcggaaaagtgaaggacccgcttgttttaggcagacaatttgactttatcagaggacagggcatccatatagcgctggatgatttcgggacggggtattcttccctggagatactgagacttctaagcgcagatgaactgaagatagacaggtcgtttctggagcgcatttcctatgacgtcacagaccaggctctgctctctacacttgtcagcctgagccgcaacatgaatatggaagtgtgtgtggaggggatagagaacagcaagatggaaaagcatgtgtgcagtctgaatccggatctgctgcaggggtttttatacagtcatccgctgagggcaaaagattttgaggcgaaatattttgacggaattcccgctgacagacagacgagaacaagttcccgtccggaacacagccagagtcttgtatatgcgtcgttccgtcctgcacagtccatgagttcccaggagatgatcgacagcgcctatgcaggtattttccaggtaggcatggacgaggaattttcgcttcttacgtgcaatgaaggataccggcggatgctcggttatacggctcaggaggtggaaaagaaatttaaaaaccatgcgcttgggcttgttcatccggatgatataaaatacgtgaatgaggagatacgcaggcagctcggtgaaagtgatacggttacgatcgagttccgggtcgtcagaaaagacggaacacctatctggatcgtgggtacaggcaatgtatatcacagcaatgacggcagcgcaagcctcgtggtcgtcatcatcaacaatgatgagaataaacgcaggcagcttagcatggagagagaacacgcgatgtcgaaaaacattctgaacaatctcccgaccggtgtaaaatgcgtccggttcgatgcagactttacaatagactacatttcagacagcatgctaggtctcacaggatatacgagagaagacatcagagaactgtttgataataaatacatcaatctgatctatgaggaagaccgtgcggcggtgacaaatgacattcttgaacagctgaaggtgagcaatgtcgtcacgatgcggtaccgtaccccgtgcaaggacgggcgctacatctggctggagaccatttcaaaactgtgcgaggcgggagaggacggcattcagcgggcctattccatggtgatggatatcacggataacggggaagagaagaaggatacagacagagggcttaagatcgccaaccggtatgaaatggttgccgaacagctgggagaatactttatggagtatgattttgacagcgacaaagcagtgttctcggataatttcaaccgtgtattcgggtatcagggggaaatatctctcgccgaattgatgacgagggtgcatgaagaagatattcctgagcttcagaaaagaatcgatgaggcgaagggcggaacgcggccggattctgtcgaactgaggctgtttatcccaggtaagacttaccgctggttctcagtcacaatgacgattccggagaaattcggcgataaacctatgacggttctggcaaagctcacagacattgacgaggaaaagaaagagatcgaacagctgcgcttaaaatcccagcacgattccaccacggctctgctgaacaaggccgccacggaggatcggatacgcgccctgcttgacggagccggccccgatgaccattatgtcttcttcatgatagatattgaccattttaagcgagtcaacgacatgtacggacattttacaggtgacgaagtgctccgcagtctggcgcagcgcatcagaggccgttttcgcggggaagatatcatcggaaggatcggcggcgatgaatttctcgtcttcatgtcttacagcggagatatacaggaagtgatcagtaaggcaaggctgctcgtagatgtgcttcaccagccgatccaggtggacggtgagactgtaaaagcgacagtgagcgtcggtgcgtcctgctatccggaggacggaaaagatttttacaacttatacagaagagctgacagcgcgctctaccggaggaaatcaatgaatcgggacggtttctgccttgcggccaggtttgaaccgccggcagagtaagatgacaaaaacatatatataagcttcaaagcggaggacatacaattgagatatgtcttccgcttttgtattgcctctcgtaccgggcggaataatccgtttaagatgcgggtatgttagtaataaaaatgcgaaaaaagaaaaagactaataattctgatgaattaaaaaaatgtaataaaaagtctaacattatgcatcgtatagtgtataatgaagttaaataactgaaattgcgaaaggggtcagacccctgttgcgcgaggggtctgacccctatgaaaaatggagggatttgtatgctggagaagttggatttaacgaaatcgttgagtaagtctgaatataaggacaagatgttggagttggagccaaaactcggtaaactgcagcgggagtgccgggaacttgggattccggtcatgatcgcgtttgaaggttacggggcggcaggcaagggcgtacagatcggggagctcattcaggcattggacccaagaggttttgaggtgcacgcggtgaagaatgagacgcaggaggaacggatgcatccgttcctgtggagattttggacgaaaatgccatccagcgggcggatcgcgatctatgacagcacgtggtaccgcaaggtactcattgaccgttttgacaagaagacgaagaagaaggaattgtccgcagcctatgattcgatctgctcttttgagcagcagctggcggatgacggcatggtactcattaagatctttctcgccattgacaggaaggagcagaagaagcggtttgagaagctgctaaattcgcaggagacggcgtggagagtcagcaaaggggacttaaagcgcaataaggaattcgcacgctatgaaaagatgaacgaagatatgctggcccgcacagacacggattatgcgccatggaatatcgtggaggctacggaccgcagatttgcggcggccaagatatattccatcgtcatccaggcgctgtcggaacgcattgactgtgtgaaaagagcacaggaagaaaaagaaaatgtgaaggtatatacgtcagaagacctgcaggaaatgagcaaagaagaggccgggaaggataaaaagcttggggagtccattctggcaaaggcagatctgagcctttcctacagcaaggaagagtataaaaagaggctcgataagctgcagagtaaaatggcaaagctgcacggagagctgtaccggaggcggattccggtagtgcttggatttgaaggatgggatgccggcggcaaaggcggggcgatcaaacgtctcacagccaggatggacccgcgggggtatgttgtccgtccgacggcgtccccgaacgatatcgaaaaggcacatcactatctgtggaggttctggacagcaatgccgaaggccggacacgtcaccatctttgaccgcacatggtacggcagagtgatggttgagcggatcgaaggattctgtacgagagcagagtggcagagagcttataaagagataaatgacatggagaaagaccttacagatgcggggacggtcgtaataaaattctggatgcagatcgacaaggatgaacaggaacgcagattcaaagcgcgtcaggagaatccggagaaagagtggaaaataacagaggaagactggagaaaccgggagaaatgggaccagtacgaggaggcagtcaacgagatgctcatacgtacgtctaccccaaaggctccatgggtcgtcgtggagggaaactgtaagtattacgccaggataaaagttctggaaacagtagtggacgccatcgaaaagcgtcttgcgtcggaaaagagggatggcagatgagaaatcacgaagtgacaaaaagacagccgcttctgagggaagacggcactctcaccgaaccgggatggtcaaaaaagctcttgcagcagtatgacagaagccggatcaaggcgccgaagttcaggatcaaagagtgggattattatcttgtgctgaatgaagagtttgcgggggctttcaccatatcagacgatggttacatcgggctccagtccgtatctctgctcaactttaaagaagggtgggagcatacggagacgatcctgaacccatttccgatggggcggtttgcgcttccgcccacctcggaggcaggggatacctcatacagagataaacgccttcagatgcggtttcttgtctcgaaagggcagcggcgcatcgtgtgcgattttgacagattttatgacggaaagccgttttcctgcgatatactgctgcatcagcctgagatggacacaatggtgatcgccacgccctggaaagagaaaaagactgccttttattataatcagaaaatcaactgtatgagagcggagggcaccatgcagtacgacggaagaacttacacatttgcgccggagacggattacgggacattggactggggccggggtgtgtggacgtatgacaacaggtggtactggggatccggcaacatgacggtggacggagtaccttttggattcaatattggatatggatttggtgatacgagggcggcttcggaaaatatgttattttacggcgggatctgtcataaattagaggatgtaacattccacattccggaaggcggttatatgaaaccgtggaagttcacgtcgagcgacggacggtttgagatggactttacacctgtccttgaccgtgcggccaaaacatcggcgcttgtcatcgtgacagaccagcatcaggtgttcggcaggatgagcggcagggccgttctcgatgacggtaaagtgatagaggtgaaagatatgatgtgctttgcggaagacgtacataacaggtattaaaggagcggaggatagaggatgacgatcagggaacagctggaactaagagaaattgaatacttgagcccttatgcagcgctcagcaaggactccggcggcaggaagaaggaagaggaagaatgcgatatccgccccgttttccagagggacagggacagaatccttcactgtaaggcattccggagactgaagcagaagacgcaggtatttctgcttccaaaaggagatcattaccgtacgaggctcacccacacactggaagtttcgcagaatgcccggacggtggcaaaagcactgcggctgaatgaagatctggtggaggcgatcgcgctcggccatgatcttgggcatacgcctttcggccatgcaggagagcgggcgctgaacgaggtgaatccggccggattccgccacaacgagcagagtgtaagggtggtggaatgtctggagaagcagggcgagggactgaatctcacaacggaagtcctcgacgggatcctgaaccataagtccagcggaaggccccggacactggaggggcagatcgtacagctctcagacaagatcgcctatatcaaccacgacatagatgacgctgtccggggcgggatcttaaaggaggaagacattccggccaaatacacggatattctcggaaattctacaaaagtacggctcgatacgatgatccacaatgttatcacaaacagtatggaccagccgaagataagcatgtctccggaggtgagggaggcgaccctcgggctgcgcagatttatgttcgagaacgtataccagaatccgacagcgaagggcgaagaagtcaaggctgtcaatatgatcacaaacctgtatgagtattatataagacatctaaagctgctgccggaacagtatctgtccatgatggaagaaagcggtgagagcagggaacagatcgtgtgtgattacattgccgggatgacggatacatatgcggtaaagaagtttgaagaattttttgtaccggaatcttggaaaatttaaaggaaatcaagtggttttgtcgaatactatatatgaggacatttttacccggggcagtttaaatgtatctgccccgggtatctcagtgtatatataggaggaacgatgtattattcagatgatctgatcgaagaagtgagagcgaaaaatgacatagtagatgtgatttcaggttatgtgaaactgcagaaaaaaggaagttcctattttggtttatgtccgttccataatgaaaagtcaccgtctttttctgtcagcaggcagaagcagatgtactattgcttcgggtgcggcgccggaggcaatgtatttacgtttataatggaatatgaaaactatacgtttctggaagcgctccgctatctggcagagcgtgccggtgtcgaactgcctgagcaggacgagtccgaagaatcaaggaaaaaggccggtgtaaggtcgacgcttctggagatcaacaagctggcggcacagttttattacgcgcagctgaaagatccaaggggagagcacgcgctcagctatctgaagcaaagggagctgagcgatgagacgatacgggcgttcggcctcgggtattccggcaagtcgggaaaagaactgtacagatacctgaagtctaaaggatactcggatgacatattgtttaaggcgggactgatcgcgtttaatgagaaaagcggtccgtatgacaagttctggaaccgtgtcatgttcccgatcatggatgccaacagtaaagtcataggcttcggaggacgggtgatgggcgacggacagccgaagtatctcaactccccggagacgatgatatttgataagagcaggaatctgtacggactcaacagggcaagaacattcagaaaaccatattttctgctctgtgaagggtatatggatgtcatatctctgcatcaggccgggttcggcaatgcggttgcttcgctcggaacagcgctcacctcgggacatgcgtccctgatccgcagatatgtggaggaagtatatcttacttatgacagcgatgaagcagggacgaaagccgcgctcagggccgcgcccatcctgaaagaggcggggatcaccgccagggtgatccgcatggagccatacaaagacccggacgaattcataaagaatatgggagctgaggcctttgaggagcggatcggcaaggcgcgcaacggatttatgttcgggctggaagtgctggaaaagcagtatgacatgaaaacgccggaaggcaagacagagttcatgcgggaggcggcgacacgtcttactgaatttgacgaagagatcgaacggaataattacatagaagcagtggccggcgcgtaccacgtcgggtatgaagatttaagaaagctggtagggcgcatggcggtccagaaaggacttgcgaaacctgtcgtgagagcaaagacggcttccggccgtgagaaggagaacgggatcgtcaaatcccagaaaatactgctcacctggctgatcgaggaagaaactatcttccggcagatagagaaatatatcaagccttccgattttacgggagagctgtaccggacagttgcacagctgctgtacgaacaatacgaggcgggggaggtaaacccggcgaagcttatgaatcacttcacagacgaggaagaacaccgggaggttgcaggcctgttccacacgaagataaaagagctttccaccgcggcagagcaggaaaaagcactgaaggagacagtaatacgggtgaagagccacagcatcgaggaggccacgcacaatctggagcctgcggatattcagggtctgcagcggctgatggaagacaaaagagccctgcaggaccttgaaaaactgcatatttctgtcaattaaggataaaatataaacaagcaatgagaggatggacactacatggaagaaaacacagtgaaatttgaggagaaattaaaagaactcgtatctcttggaaaaaagaagaaaagtattctggaacttcaggagatcaacgatttcttctctgacatggaacttgaatctgaacagatggaaagagtgtttgaacatctggaagcgaacaacattgacgtgctgagaatcagcggggatgacgatgatattgacgatgcggatatcataatctccgaggaggatgaagtagacgtcgaaaaaatagatctttctgttccggatgggatcagtattgaggatccggtccgcatgtacctgaaagagatcggtaaagttccgctgctcacggcggatgaggaagtagaccttgcaaagcggatggcagacggggatgaggaggccaagaaaaggctcgccgaggcgaatctgcgtctcgtagtcagtatcgccaagcgttacgtgggccggggcatgctgtttctcgatctgatccaggaaggaaacctgggccttattaaagccgtggaaaagtttgactatcataaaggatttaagttcagtacgtatgccacatggtggatccgccaggcgatcacgagagccatcgccgaccaggcgagaacgatccgtattccggtccatatggtggagacgatcaataagctgatccgtgtgtccagacaattactgcaggagctggggagagaacctacgccggaggagatcgcggccgagctggacatgccggtagagcgggtcagggagatccttaagatctcccaggagccggtgtctctcgagacgccgatcggcgaggaggaggacagccatctcggcgattttatacaggacgacaacgtccccgtgccggcggaagcagcggctcagacacttctgaaagagcagctggacgaggtgctggatactttgacggagagggagcagaaggtcctccggctgagattcggcatgaatgatggacgggcccgtacgctggaggaagtcggcaaggaatttgacgtcacaagagaacgtatccgccagatcgaggcgaaagcacttagaaagctgcgtcatccgagccgcagcagaaaattaagagattatctggattaagaaagaggcgcctatggaactatcaaaaagactgcgtgcagtagccggtcttgtgacagagggcgcctctgttgcagacatcggaactgaccacgggtatatacctatttatcttgccgcgcacgggaccgccgggaaggtgatcgcttcggatatcaatgaagggccgcttgagagggccagaatacatatacagggacaaaaagatgtatgcggaaagattgagacgagacggtcggacggccttaaagccataaagcccggggaggctgatacaatgatagccgcgggaatgggcggaggactcatcatccgtatactggaagaaggaaaggacgtgacagagcagatgaaagaccttatcctccagcctcagtccgaggccgggaaggtgcgcagttatctgaacggccacggctttgtcattgtagaagaggatatggtggaggaagaaggaaaatactaccccatgatgcgggcggagcacggaacagccggcacatatacagagactgagctttgttacggaaagctgctcctggaacagcggcatcccgtattaagagaatatctgctgagggaacagcgtataaaaagggatatagaagtacagctgggcgaaagcaaaagtgagcgctcagcaaagcggaggaaagagcttgaaaaagaaagaaagctgatacagaacgcgcttgaatattatagatagcagagaggagaagagggcatgcggtgtaaagaaatcatagacctgatcgagaaaaagtattctccggagtacgcgcttgagtgggataacgtgggactgcttgcaggcagagacgacaaggaagtgaggcgtatctacgtggcgctggatgcgacagacgaggttgtggatgcggcggcagagcagggagcagatatgctcatcacacatcatcccctcattttcggcgcggtaaagcgggtgacaaacgaggattttatcgggcggcggatgatcaaaatgctgcagaatgacatatcttattatgcgatgcatacgaattatgatgtgctcggcatggcggagctgtccggaaagatgctcgatcttcacgacgcggaagttctggaagtgacgagagacgacggacatcctgaagggatcggcagagtggcagacctggaagaggccataccgctcagagagtgtgtcgggtacgtaaaggactgctttcatctcgggccggtcaaagtattcgggaaactggagcagaaggtgaaaaggatcgccatatcaccgggcgcgggaaaaagcatgacgggcgcggcgctctgcaaaagggcggatgtgctcatcaccggagacattgaccatcacacgggcattgacgctgtggcagacgggctctgtatcattgatgccggacattatggtgtggaacatatttttatcggtgatatgaaacggtatctggaagaaaatactgagcatatagaaataacagcagcgcctatacagcatccgttcgagatcatataaactctgtgtccctgggcgtacagctcggatgccggaaaggcacactttctattaaaagaggaggaagatatggataaagaaatgtacagcgtacagataggggaagaaataaagcgttatgagcgcggaactacatatgaacagatcgctcaggaatatcagaaagattatccttatgatatcgtgctcgtattcgtgaacggacggcttcaggaactgtataagacgctgaactccgacgctgtgataagctttgtgacaacggctgacaatatcggccacaagacgtacaagagaagtatgagcctgatgctcgtcaaagctgtctatgacgtggccaaccacgaggcgatcgacaaggtccggatccactatgcggtgagtaagggctattactgcacgatagagggagacattgaactaaatgaagagttccttgataaagtagaggcgcgtatgtatgagatggtcgagatgaatatgcccattcagaagagaagtatccatacggacgacgctgtggcgctcttccgccagcatgggatgcgggataaggagcgtctgtttgaataccggagggtgtcaaaggtcaatatatacagcatgaatgaatttgaagattattattacggatacatggtgccgagcgccgggtatctgaaatattttaaactgtacctgtatgacgagggctttgtcatccagatgccggtggaagaggcgccggatatcgtccctccttttgagcctcagaacaagctgttccaggtgctgaaggaatctacaaagtggggggatatacagggaatagagacggtaggagcattgaatgacaagataaccaaaagcgacgttcgtgaagtggtgcttgtgcaggaggccatgcaggaaaagaagatcgcggagatcgcatccgagatcgcaggccgaccggaaataaagtttgtacttatcgccggcccgtcctcttccggaaagacgacattttcccacaggctctcgatccagcttcgtgcaaatggacttgtgccccatccgatagctgtggacaattattttgtggaacgggagaacaatccgaaggacgcggacgggaattatgattttgaatgtcttggggctgtggacgtagagctgtttaacagacagctccggcagctgacagaaggaaaagaagtgatcatccccaactttaacttcgtgacaggacacaaagagtatacgaacaaaccgaagaagctcggcgcaaacgacgtgctcgtgatagaagggatccactgtctgaatccgaagcttaccgaacagctggcagatgagaacaaatataagatatacatcagcggcctgacccagcttaatatcgatgagcataaccggatcccgaccacagacggaagactcatacggaggatcgtgcgtgacgcaagaacgcgcggatcgtccgcccgaaggacgatcagtatgtggccgtccgtgagaaggggagaggaacagaatatatttccgttccaggaagaggcagacgtaatgttcaactctgccctcatctacgagctggctgtcctgaagccgtatgtagaggcgcttctgtttggcattgagaaagactgcgtggaatatatagaggcaaaaagacttttgaaatttctcgattattttgtcgggatcggaagtgaatatgtgccgacaaactctctgctgagagaatttatcggcggcggctgctttaacctgtaaggaacgtaacgcggggcggcagaaggatggtcacagtctcatatcatccggcaggggggacacaaagtccataagtttacccgtgaccgggtgcgggaaagtaagccggcaggagtgaagagcctgccggcttattatcgtatagtccgggtgatagagaaagtcgcccgggagcggatggccgatatgcttcagatggacgcggatctggtgcgtgcgcccggtatcaagcgtgacggacaggagggaataccctttccggtagtccagccgtctgtaatgtgtgcaggcatattcaccgtttgtttcatctacgcaccgttcgatcgtggagcgggaacggcgggcgatgggggcggtgatcgtgccctcggaaggggtcagcccctctgccagcgccaggtattcccggtggatgcgccgctctttgatcatggcatacagtatggaagcgctgagcatgtgctttgcgacgatgagcagtccgctcgtattcttgtccaggcggttgatgcagcggaaggtaaaggggatgccccggcggctgtaataacagacaagggcgttggccagtgtgttgtcgtgattgccctgggacggctgggtcggcatgcctgcaggtttgtcaatgacgagcaggtcttcatcttcataaatgatatgcaggggaagggaaaccggcgcaatgccggcggagccttccttttcctctatcgtgaccgtcaatctgtcgccgcatctcagcttgtcacaggtcctggcccacgcgccgccgcggcagatcccgtccggagtgtgcttcaggtgggtgatgacagtatgagaatatccccggcttttcagaaagccgaggatatccgttccgtcatattcttttggaatgctgtagtcaaggatccgtttcatagtgcacctcttgtcacttggattttacttcgcgccacagttcattgtatatggcatcgttttcatcaccgaggaaccggaacgtctcacaccgctccaggtctttttcgggaggaaaggctatcgggttgtcccggagcgcttcgtcctcgatcagggcgcgcccgcccacattaggggtggagtaggtgatataatcgaagttcattttggcgatgtccggccggcacaggaaattgatgaacttttcggcattttccttgtgctttgcatttttcgggatgacccaggaatcgatccagacgttggagccttcttttggaattacatattccagatccgggttttcccactgcgtgtatatggcttccccggaatagataaccccgatggccgcctcgttgccgatcatcttatcgcgcacctggtctatgacataggcctgcacgagcggcttttgctcgatcagcagttttttggccgcctccagctcatccagatccgtggaatttaacgagtagccgagatatttcagtgtgatcccgaaggcgtcacggacgctgtcctgcatcagtatactgtctttgtatgtttcatcccacagcacgctccagctgtcgatcggtccatcgaccatcttcttattgtacagaatgccgacggtgccccacgtgtaggggacggaatatttgttttcagggtcaaactggcgggacatgtccatatacgtatccccgatttcttttatattggggacattgtcaaaattgatctctgccagcaggtcgttttcaagcatacgctgtatcatatagtccgaagggcagactacatcgtaggcgatcgcgccggactgtatcttcggatacatgatctcgtttgtctcatattcttcatatacgacatcaatgcccgtctcttcctcaaatacggtaatcgcatcagggtccagatattccccccagttgtagacgataacctgatcagcgccgcccgtatccgccctggaaccgtagaaaacgccgcctacgatcacgacggccgccatcatgaccggcacaaccttgcggaaaaggaaacggcttatcttatgcctgcgccgcggtttttcaggtatccgcccgcgcacctgcttctcctcgggcgctatatttacgagaacgagcaggagaagtacggtgacaaacatgatggtggacagggcgtacatctccggtttgatccccttgcgcacttcactgtatattttggtagacagggtgtccacgcccggtccctttgtaaaatgtgtgatgatgaaatcatccagcgacattgtgaaggccaggagaaatccggaggacactcccggaaggatatctggaaaaacgactttgaaaaacgcatggacaggggacgcgcccagatccagcgccgcttcataggtgctcttattcgtctgcttcagcttcggggtgacgctcaatatgacatacgggatattgaacgttatatgggcaaataaaatcgttgaaaagccgagggagaagcggaacgcgatgaacagaagcataagggagataccagtcacgatatccgcgttcagcatcggtatgttcgtgacccccatcataaatgtacggaacttacttctgagcgcctgtatcccgatcgccgcggctgttccgataaccgttgcgatcagagcggagagcagggcgatgatgagcgtcgtatataaggcgttcatgatctgttcattgcgaaacagttccacataccattttgttgtaaatcctccccatttcgagcgggacttggacgcattgaaggaaagtatcatcaaggtcacgatcggcgcatagagaaggatgaggatcaaggtgagatagactctctgtaatacacttttcatcaaaatgcagttccctccccgtctttgtcatatttggcgatgagtgccatgcttatgataataaataccatcagtacaagtgaaagcccggaaccgacgtgccagttgcttccctgcttgaactcctgctcgatgacgttgccgatcagcagtatcttgctccctccgagcaggtcggagatgacgaaggtagtgagcgccgggacaaacaccatggtgaccccgctgatgatgcccgggacgctgaggggcagtatgatgcgcaggaacgtctgcacgttgttggcgccaaggtcccgtgcggcggcaatgatatccttgtcgatcttcgacagtacgttatagatcggcagcaccataaacggcagaaaattatacaccatgccgagcacaatggcataaggcgtattgatgatatccagcgacggaaggtgcaggaattcgaggacaacgttgataatgccgttcttttccagcagattctgccatgccagtgtccgcagaaggaagttcatccacatgggaaggatgaagatgagtacgataaagctttgctggttcacgccgagattcgtaaggatcatggagagcgggtaggcgagtataaggcagaagaccgtgctgataaaggagagcagcagagccagcccgagcgcttttaagttctccggcgttgttatcctggcgatattcagcagagtaaagcccccgtttttgtccgtgagaccatagtacagtatcatgagcaggggaatgatgatgaaggctgcacaccagaacatatacggtcctgccagcagctgtttcattttcttgtgtttattcttcaatggttaccgcctccgcatcttcagattctggttttttcattatctgtatatcaaaagggtccacctggattcctacctcagtgccgacaggaaccatgtctgtactgtgcacgagccattcaaaattgttagccgttacctccatctcataatggactcccttgaagataagatgagtcacgacaccttcgataataccgtcttccggctttacaaggtcaatatcttcaggacggatgacggcgtccaccggtttgttttttccgaaaccgatatccacgcacgggaagtttgcgccgagtatttttacgagcttatcctggaccattgtggcggggagaatattgctctctccgataaagtcggccacaaaggcgttcttaggctcgttgtatatgtcctccggcgtaccgatctgctgtatatatccctggttcatgacgacgatagtgtcggacatggtcagcgcctcctcctggtcatgtgtgacatatacaaaagtgatgccgagctcatttttcagccggatcagttcatactgcatatcctggcgcagctttaggtcgagtgcgccgagcggttcgtcgagaaggagcactttcggctcgtttacgatggcccgcgcgatggcgatccgctgctgctggccgccgcttaaggagtcaggcgtgcggtcctcaaagccttccagattgactagcttcagagcgtagcggatcttatcattgatataagacctggtctttcctttgatcttcaggccgaacgcaatattttccgcgatcgtcatattggtaaacagggcatatttctgaaatacggtgttcagctggcgtttgttcggcgcaaggtccgtaatattctttccgtcaaaaataaccttcccggtgtcgggagactcaaaccctccgatgatcctaagcagagtagtcttgccgcagccgctcggaccgagcagtgtcagaaattcattttcccttatatacaggttcaggtcatcgagtacaaggttatccccgaaagattttgagacatttacaatatcaattaatttgttagacatagtttcctcctggtttgtatatttaaaaactgggcggggtgcttacccatatgatgactgcccctgtcgttctgcttccttctatataatgctcagagtgcggggtaaaataaaatgcctccccctttttggcgccgtacactttcttgccgacatggatcttaatactccccttcagtacataaccgaattcctcgccctcgtggggaacatccagatacgtggaaccgcccggttcaagtgtaagccggataggttccatcatatttttctgtgcatttgggatgatccattccgtcttgttcttaaggtcggtatctatcttttcaaaataatcttcatcgtggaagacgatctgttcttccgggtcttcgctgaagaattcattgatcgtcgtaccgagcacctgcagaagatctacgagcgtggcgatggaaggtgacgtaagatccctctcaagctgtgagataaatcctttagaaagctcggcccggtccgccagctcttcctgtgtaaggtccttggcgatacgcagttctttcagtttttttccgatatccataacggtcctccgcgaaactatgattgtaaaagtaaaaataaacataaagtttagtatttcttaactcacatgcaaaatctattatactatatctacccgaaagttcaacatttttttgaatatttgtgggaattttgttggggatttttgggagttgggggtagacggcagatggtatggatgcgcgcgggtgtctcaatggacagacttgtatgcaaatccattgtggccggccatgggaatcttacatgttgaagaaatttgagccatgtgaagtgtcaggcggaggaacggcggcagggagctgtgggcgttggagggagctttgtcaagatgttagggaagaagacacggtaggaacagaccataaactgcaccacaagtgcagtttatgagacagctgacacaggaaatcatccagatttcctgtggaattctgtcggtgtctgttcctaccgtgtcttctttccttacagcttgcaagcgcaccgaccgtcccacagctccctgccgccgttcctttgccgtacgctgcaatcctcctcaaatccctccaacaaaattcccctctataattccccgaggtagaatttttctaacgactccatccttgcggacatgtttgtcatgagcagatcggccagtgtgaccgcgaccatggattcgatcaccacgacggcgcgggggacgatcacggggtcgtggcggcctgtgatggttatttccgtgttggctcctgtacaatctaccgtctcctgaggctgggcgatggatggcgtcggctttatggctgcccgcagcaggatggtgctgccgtcgctcatgcctccgaggaccccgccggaatggtttgtttttttcgttatatgtccgtcagaagagcggaaggcgtcgttgtttgtgctgccattcgcggcggcagcacggaagccgtctccgatttccacacctttaacggcgccgaccgacatcactgctttggcaaggcctgcgtccagcttgtcaaatacaggttcccctatgccggcaggcatgccggtcaccgcacattcaatgactccgcctgaggaatccaggtttttgatacattgttccaggtaggcggaagctttgaaagcataatcgttgtttggcatatacagggcattttcacggatgcagtcataattatattcagatctgggcacagtaatagtaccgatcgcgctcgtgtaggctgtgacctgtataccaaggcctgcaagcagcttggaagcgacagccccggcagcgactctgccgatcgtctcgcgtccggaggagcgcccgccgcccctgtgatcccggaaaccgtatttgcagtcaaatgtatagtctgcatgtcccgggcggtaacagtcttttatcttgccgtaatcccgggaacgctggtcctggttccttataagaatagagacaggtgttccggtcgtctttccctcgaatacaccggaaagtatctccgcctcgtcggattcctgccgcgccgtcgtatatctgctctgccccggccgtctccggtcaagaaattcctggatatctgtattggtaagagggagtcctgcgggacagccgtcgatgacaacgccgacagccggaccgtgggattctccccaggttgtgatcttaaataaagttccataagttgatcctgccatgattcgtctcctttgttgtgaaatacataatcctattatacccgtaatcaccaaatcttcaagaattcttcagcaatttttcactaattagcactgtacttttgacaggcatcatattataatagatgcgtgtgaatattttaatgaggagtagacgactatgtcagatatgcagaagagaccagaagatatcgacagagaatccgaagaaatcatagaagaaactatgaaggagatctttgacgatatcaataactcagacgaatttaaggaaatggatgacagctatgaagaatccgaagaagcagcagatgaatctggtcaggaagataaagcagaagaggaaaatggcaggccgcttagtgaagatactgacgccggtgacctatcttctgatgacagtgatattgaaacagccggagtagaagaagagcctgactctgaagacgaagcggcggaggaagaagcatccggagataacgatgaatccgaagatggcgatgaatctgatgaggacgactttgaacccgatgaggatgacgttgaatccaatgaggacgactttgaacccgatgaggatgatgttgaatccaatgaggacgactttgaatccgatgaggatgacgggcaagaggaagagacggaagcggagaaagagctgaggaggcacagaaggagaaagaaggccggaattattgccgcctctgttgcgggggctcttattcttatatatattggatttgctatttttttcagcagtcattttatgtttttcacagagatcaacggacaggacttttcgatgaagagtgtcagccaggtggaagagtatatgaaaaagcaggttgctgattatgtactgacactgaaagaatcggacggcggtacagagacgatacgcggcgcggatatttccctggaatatgttcagggaaaggaactgaagcagcttgtcaaaaagcagaataattttctctggatcgagtcgctctggaagcaccctgagatcacggcggaagtcggtgttaaatatgacgagaatgcgctgaaaagtattactgagaatttaaaatgcctgaacccggacaatcagacggcctctgttgacgcacatccggaatttaaagatacggaatttgtcattgttccggaagtgatcggcactcagatagatactgaaaagtttaatgaggcagtgtctaccgcgatcaacgggttcgtatcaagtgtggacctggcggatgcggggtgttacatcaagcccagatttgtctctgattccaaagaggtgacagcggcaaaggatgccatgaacagttatctcggtgcgagtgttacgtatgatttcagtccgaacacggaagttgtggacgcttctgtcatctcccagtgggtgaaggtggatgccgacatgaacgtgacctttgatgaagaggcggtaaaagcttacatccagacgctggcggataagtataacacaaaagggaaaacgaggacatttacgacggcaggcggcaacagtgttaccgtggagggcggaagctacggatggaggatcgaccaggaggcagaatacaatgcgctgacagccaatataaagaacggcgagacagtgacaagagagccggaatattccagccgggcggcaagccacgatgtaaatgactttggaaatacgtatgcggaagtagatcttacgaaccagcagatgtattttatacagaacggccaggtagtgcttcagaccggaattgtaaccgggaatccgaacaaaggaaacggaacgccgcaggggacatactctctggcgtacaaagcgcttgaccaggtgctcagaggtaagaaaaaaccagacggcacgtatgagtacgagtcaccggttaagttctggatgccgtttaacgggggcatcgggttccatgacgcgacatggcagcctacatttggaggctccagatatcagacaaacggttcccacggctgtgtgaatatgccgtatgacaaggcggctcagctgtatgatcttatctcagcgggcacaccggtaattctgcattattaatcagtataaaagtaagaggtagagatcatgtatgaagtgttaaaacaagatggtcttgccaaaagaggaaggctgcagacagtacatggagtcattgagactcctgtattcatgaacgtgggaacagcggcggcgatcaagggcgctgtttccaccgaagatctgcaggaaataaagacacaggtggagctttccaatacatatcatctgcatgtacgtcctggtgacgttgtggtgaaagagcttggcgggctccacaaatttatggtctgggataagccgatccttacggattccggcggattccaggttttttctctggcagggctcagaaggatcaaggaagaaggggtatactttcagtctcatattgacggaagaaagatatttatgggaccggaggaaagtatgcagatacagtctaacctggcgtccactatcgccatggcatttgacgaatgtccgtccagcgtggcggacaggaattatatagagaagtctgtggagcgcacaacgaggtggctcgcccggtgcaaaaaggagatggagcgtctgaacagtctgccgggtacgatcaatccccgccagcttctttttggcatcaaccagggaggtatctgtgaggatatccgcatccggcacgcaaaggagatcgcagctatggacctggacggctatgcagtaggcgggctggcagtgggagagtcacatgaggatatgtaccggatactcgatgcggtcgtcccgcatctgcctgtggacaagccttcttatcttatgggtgtggggacgccggcaaatattctggaggcagtggacaggggaattgatttctttgactgtgtatacccgagcaggaacgggcggcacggccatgtatatacgaacggcggaaaactcaatctgttcaatgccagatatgagctggatgccggaccgatcgaggaaggatgcggatgtccggcgtgcagaacttattcaagggcgtatataaggcatcttctgaaagcaaaggaaatgctcggaatgcggctctgtgttctgcacaatctctatttctataatacgatgatggaagagataagagaggctattgaaaagggctgttataaggaatataagtcagaaaaactggcaaagatggcaggacaggaagtataaaatttccatgaaatacggaaaagtacttgatgaaaaaagcatttttgtgtatgatagcaatagtgtttaaagatatgtaggaggaataagttatgtacgcattggcagcacagtccgggagtaattggattttactcatcttagtatatgtactgatcttcggaggcttctggttcattttcatgagaccgcagaaaaaggagcagaaaagactgcaggctatgatcgcagatatggcagtgggagatacagttcttacgacaagcgggttttacggtgtcatcatcgatataacagatgacgacgttatcgtagaatttggcagcaataagaactgccgtatccctatgcagaaggcggcgatcgcgcaggttgaaaaagcaagcgcagaataaagacaagagatgagcgaggaatcccgtgagggattccttttttgcttcttttaaaggctgtgagatatatacgagtaatattttgtatgaaaacaggaatacttaagtatagaaagtatcattgacaaatgcggaaatacagattatggtaatatatgtttgtgaactgtgaatgctcatcgtgtatggaaaactccatgtcagatgatctaatgaaggagacggttatggaattaaacggactggaaacacttgtaaaaacaaaatatggcagagagatcaaagaattgagcgatgcggagatctactacgctctgcttgcatttacgaaagaaaaattaaaaaatacgcctgacaacaagggcggcaagaaactgtattatatttcagcggaatttctcatagggaagcttttgtccaacaatctgatcaatctgggcatctacgaggaggtgtctgaactgctggtgaaaaacggcaaggaactggcaaggatcgaagaggtcgagccggagccttctcttggaaacggagggcttggcaggctcgcggcctgctttctggattctgcggcgacgcttgggttagaaggagacgggatcgggcttaattatcatctcggcctcttccgccaggtttttgagggccataagcagaaggaaatgcccaatccgtggatcggggaggagaactggcttacggataccgggatcaggttccaggtgcctttccgggactttacacttacgtccagactgtatgacatggatgtgtgcggttatgaaagcggaaagaacaggctgcatctttttgatgtggaaggcgtggatgagagcattgtaggagaagggatctcatttgacaaaaatgatatccgtaagaatctgacgttgtttctctatccggatgacagtgacagggcggggaatctgcttcggatctaccagcagtattttatggtctcaaacggggcgcagcttattttaaaggaatgtgaggagaacggatatgagcttcgcagactccatgagcatgtggcggtccagatcaacgatacgcatccgtccatggtcataccggagcttatccgcctgctcgtcgaaagaaatattgactttaatgaagcggttgagatcgtacagaagacatgtgcgtacacgaatcacacgattctggcggaggcgctggagacgtggccccttgcgtatcttgaacaagttgcgccgcagatcgtaccgatcataaaagaactggatctgcgcgtaaaaggaaattgtcacgatgagagggtgcacatcatcgacagccaggaacgggtgcacatggcccatatggatatccattacggacacagtgtcaacggtgttgcggcgctccacacggagatacttaagaatacagagctgaaaccgttttacgatatatatccggatcggtttaacaataagacgaacggcatcacgttccgccggtggctgctccactgtaacaaagagcttgtgcgctggataagcggttacgtggaagaggatttccgcagagatgcaaacaagctggagaagctgctgcgccatatcgagagtgatattgcgctggaaaagcttctggatgtaaagcatgaaaagaaagtgcagcttgctcagtatctgaaagagacacaagggatagagctgaatcctgactctatcttcgatatacaggtaaaacggcttcacgagtacaaacggcagcagatgaacgcgctgtttgtcatctacaaatatctggagatcaaggcgggaaagataccgtccactccgataacggtgatcttcggggcgaaagcggcgccggcgtataagatcgccaaagatatcatacaccttattctctgcctgcaggagcttgttgacaatgacccggatgtatctcctcatcttcaggtcgttatggtggagaactacaatgtgacaatggcagagcacctcataccagcctgtgatatatccgaacagatatcactggcgtccaaagaggcatccggcacgggaaatatgaagttcatgctgaacggggcagtcacgatcggaacggaagacggggcgaacgtagagatacatgaactggtaggggacgacaatatctatatcttcggacagtccagccggcaggtgatagaacactacgccaaaggcgattaccgggccgccgattactatatcaatgacgagcagatacgttcccttatcaatttcataatcagccctgagatgatgaagattggagatccgtatcacctgcttcagatacacgcggaactcatatacaaagactggtttatgacactgctcgatctgaaagagtatattgcggtcaaaaacagggcatacgaagattacgcggaccgcaaggcgtggagtaagaaaatgctcacaaatatcgcaaaagcaggttatttttcatcagacagaacaattgcagaatataataaagatatctggcatcttcaataattgtcgaaggggtcagacccctatgcaccataggggtctgacccctttcaaattatatatctattgacttgatttgtggattgttttttaacagtgtgaatatttcatagatatcgtaagattcggggaattttacatgcaatttaatttccagagtcgtatcatctacttttctggcgttgatgttggatatttttatcttgctggatgagaagatcccgccgagcagttcttttatttcttctttggaatcgacttgtatggtgatctgttccatcacagcatttctgccgtacagaaatcttgtgtggaataaaaactggagtaagacaataaataaggaggaagcaatgctaagcacatacattcccgcgccgaacgccatgccgatgcctacggtggcccagatcccggcggcggtcgtgatgcctacaacgttcatcttccggttgaaaatgacgcctgcgccgaggaaaccgactgcagttacgactccggcggcgatacgggacgggtcaaggcctatatgttctctggccagaatgtcgtaaaagccgtatttggacagcaccatcatcagagacgaggcgagcgctacgatggcatgtgtacgtataccggcagacttcatatgactttcgcgttcgtagccgatgaccgcaccgcaggccgcggctccgagtacgcggagaaaatattccaattgcaaaagaatggcagctgacattttatccctcctgttcttatatataagtatatatgatgcagagggaaaaaaccacacaattgtcaggaaagactggtttatggggagacggaatgatatgatataggaaggtaaagaaaggggatgtgcacatgatcaattattcagaggacaaaaacagacagtatcatatacaggtcgcagaaggagaagtcggcagatatgtcattcttccgggcgacccgaaacggtgtgaaaagatcgccgctcattttgacaacgcgaggctgatcgcggacagcagggaatatgtcacatatacaggtgagctggacggggagaaggtgagcgtgacgtccaccggcatcggaggtccttccgccgccatagccatggaggaactcgtcaggacgggcgcagacacttttatccgtgtcggcacgagcggaggcatggctgaagaagtaaagagcggtgatatcgtgatcgcgacgggagctatccggatggaagggacgagcaaagagtatgccccgatagaatatccggctgtcgcggacatcagcgtggtcaatgccctgatggaggccgccggcaggctgaagcttgactatcataccggcgtagtacagtgtaaggactccttctacggacagcattccccggatacgaagcccgtcgggtatgagcttatggagaaatggaacgcctgggtgaaatgcggctgccttgcctctgagatggagtcggctgccctttatatcgtcggcagctgcctgcgcgtcagagtcggatcggtcatgctcgtgatggcaaatcaggagagggccagaaagggacttccgaatccggtcgtccacgatacagaggcgccgatccaggcagcagtggaagcgatccgcatattgatacaaaaggacagactacaggaggggaaataatcatgaaaatagaggaaatattaagacatgttgatcatacgctgcttgcgcagacagccacgtgggaggacatacgcggcatctgtgatgacggtatgacatatcataccgcatccgtatgtattccgccgtcttatgtaaaacaggcgaaagattatgcaggggaaaatctggccatatgtacggtcatcggctttccgaacggatataatacgacggccgccaaggcagcggagacaaaagacgcggtggccgccggcgcggatgagatcgacatggtagtcaatcttggatgggtaaaagataaaaaatacgacagtatagaagccgagatacggcagataaaagaagccgcgggcacaagagtgctcaaagtcatcattgagacctgtcttttgacggaagaggaaaagataaaaatgtgtgagatcgtcacggcggccggggctgattacatcaagacatccaccggctttgcagatggcggagccacatttgacgacgtaaagctgtttgcggagcatgtaggaaaaggagtgaaaataaaggcggcaggcgggatcagttccatccgggacgccgaggaatttatgagactgggcgcagacaggctcgggacgagccggatcgtcaaaatagcaaaaagtaaggcagggggcctgcagcagaaggagtgcttgaattgaaaaaagagaaactgccggtgcgggagatgatccagaaagcgatggaaacactggaatgttcttacgcgccttattctaattttaaggtggcagcctcgctgctcaccggagacggtgttatatatacgggctgtaatattgaaaatgccgcctattcacctggcaactgcgcagagcgcacggcgtttttcaaggcggtcagtgaaggcgcccgggaatttactgccatatgcatcgtcaatgaggacgagaagggcggccacggcatctgtcctccgtgcggcatgtgccgccaggtcatgatggaattctgccgcccggaggaattttatatcatacttgcggcagacgaggcgcagtatgagatccatacgctcgcagaactgttccccatgggattcggaccgggaagtctcaagggataagacatataaaagaaagaggtcagtttatggaaagatttcacagagtatttatcatagttctggattcgctcggcatcggggagatggaagacgcggcgcggttcggggacgaaggagcagacacgctcgggcatatcgcgcaggcggtaccggggctttccctgccgaaccttgctaagctcggcctatggaatgcccatccgtccggaaaggaacaggcggaaaagcatccggaaggatattacggcgtgctgcaggagagaagcaacggaaaggatacgatgaccggccactgggagatgatgggcatatacacgacgaagccctttaagacatttacagagaacggttttccggaggagctcataaaggaactggaagagagaacgggccgcacgatcattggaaataaaagcgcaagcggaacagagattctggaagaactcggggaagaggagatcgccaccggacatatgatcgtctatacttctgcggattctgtgcttcagatatgcggaaatgaggagacgttcggccttgacgagctgtaccgctgctgtgagatcgccagagagctgacgatgaaggatgagtggaaagtcggacgggtcattgcaaggccgtacgtcggaaagaaaaagggtgagtttgtgcgcacgagcaaccggcatgactatgccgtaaagccgcccggccccaccgtgctcgacgcgctgaaaaaagccgggtacgacgtgatctccatcggaaagatcaaagatatctttgccggggaaggaattaccaaggcatggaaatcaaagagttccgttcacggcatggaacagacgacagaggcggcgggccaggagtttcacggactctgctttgtcaatctggtagactttgacgccctctggggacaccggcgggacccggaaggctacgccgcggagctggaacgttttgacaataagctcggtgagctgcttgacgtgctgcaggaagacgaccttctgatgatcacggcagaccacggaaatgacccgacctacaagggaacagaccacacgagagaaaaggtgccgctccttgtatattcaggctcagacaaaggcgccggcagtctgggagagcaggatacgtttgcggtgatcggtgcgaccgtggcagaaaactttggggtggagatgccggaagggacgatcggacattctctgctacatctgatcaggtaatttagcgaattaaagtcttgaaacaaacattaaaataggatattattaattctatagtttttaactgaatttttatacaggaaggatgagggtatatgaacctgaacattggtgtgataaaaggagacggaatcggtccggagattgtaactgaagccatgaaagtgctcgacagggttgcagaagtatacggacattcgtgtaaatatacacagctgctgctgggaggcgcgtccattgacgtacatggcgttccgcttaccgatgagaccgtggctgctgcaaaagcatgcgacgcggtgctcatgggctctatagggggagatgccgcgacgtctccgtggtaccggctggagccttccagacggccggaggcagggcttttgaagatccgcaaagagctgaatctgtttgccaatctgagaccggcggtgctttacgacgaattaaaaggcgcgtgtccgctgaaggaagagatcacagaaggcggattcgatatggtcattatgcgggagctgaccggggggctgtactttggagagcgcaggacggcggaagaaaacggggtgctcacggcgtatgattcacttacatataatgagaacgagatcaggcgcatagcgaagcgcgcctttgacatagcggaaaaaagaaggaagaaagtaacgagcgtggataaggcaaatgtgctcgatacgtctaggctgtggcgcaaagtggtggaggagaccgcggcggattatccggatgtgacactggagcatatgctcgtagacaactgcgccatgcagcttgtgaaagatccgaagcagtttgacgtcatcctgacggaaaacatgtttggagatattctctcagacgaggcgagcatggtgaccgggtctatcggaatgctggcaagtgcgagcctgaatgagacaaagttcggcctgtatgagccaagcggcggctccgcgcccgacatcgctggcagagggatcgctaatccgatagcgacgatcctgtccatggctatgatgctcagattcagcttcgaccttgaccgggaagcagacgcggtcgagcaggccgtggcagatgtactgaaagaaggataccgcaccattgacattatgtccgaaggcaaaaagcagacagggacaagtgagatgggtgatttgatcgcgggatacataaggaggtagaatatgagaagtgatacagtaacaaaggggatgcagcaggcgccccaccggtctttgttcaatgcgctcggttacacgaaagaggaacttgagcgtccgctcgtaggtattgtaagttcacacaacgagatcgttccgggacatatgaatctggataagatcgtggaggcggtaaagatgggcgtcgccatggcaggagggacacccatcgtatttccggccatagcggtatgcgacggaatcgccatgggccatatcgggatgaaatattcccttgtgacgagagatctgatagcagactccacagaagccatggcgctggcacaccagtttgacgcgctcgtcatggttccaaactgtgataagaacgttccggggcttctcatggcggcggcgaggatcaatgtgccgactatatttgtgagcggaggtcctatgctcgcgggccgtgtgcagggtaagaagagaagtctttccagtatgttcgaggcggtcggcgcttatacagcagggacgatgacagaagaagacgtctgtgaatttgagaataaagtatgtccgacatgcgggtcctgctccggcatgtacacggcaaacagtatgaactgtctcacagaagtgctcggtatgggactgtccggcaacggaacgatcccggcggtctattctgagaggatccgccttgcgaaacacgcgggcatgcaggtgatggaactttggaagcaggatatccgtccaagagatatcataacagaggagtcggtactgaacgcgctgaccgtggatatggcgctcggctgttccaccaacagtatgctccatcttccggccattgcccatgagatcgggatggactttgagatagacttcgccaacggtatcagtgagaagacgccgaacctgtgtcatcttgcgccggccgggcctacatatatggaagatctgaatgaagccggcggcgtgtacgcggtcatggcagagcttaataagaaagggcttctgcacacggaatgcctgaccgtcaccgggaaatcggtgggagaaaacatagcgggagcggtcaacagagatcccgaggttataaggacgatcgacaatccatatagtactacaggaggaatcgcagtgctgaaaggtaatcttgccccggacggaagcgttgtgaagcgttctgcggttgcggaggaaatgctcgtgcacgaaggtccggccagagtatttgactgtgaggaagacgcgatcgcggccatcaagggcggagagatcgtagcaggcgatgtggtagtgatccgttacgtagggccaaaaggcggccccggcatgccggagatgctgaatccgacttcggccatagcaggaatgggacttggctccacagtcgcgctcatcacggacggacggttcagcggcgcttccagaggagcttccatcggccatgtgtcgccggaagcagccgtaggcggaccgatcgcgcttattgaggaaggagatatcatcaagatcgatataccgggactgaagcttgagcttgatgtgacagaagaagaactggagaagaggagagaagcgtgggagccgagacagccccgcgtcacgaccggctatcttgcgagatatgcatccatggtcacgtccggcaacagaggcgcgatcctggaggtgccgaagaataaatagataggagatacaaaggtatgcagttgacaggagcagaaattgtgatagagtgcctgaaagaacagggggtagataccgtattcggctatccgggcggctctatattgaatgtatatgatgaattatataaacacagcgatgagatcacacatatcctgacttcccatgagcagggggcggcacatgcggccgacggatatgcaagggcaacggggaaggtcggagtgtgttttgccacgagcggccccggcgccacaaacctggtgaccggaatcgcgaccgcatgcatggattccatcccgctggtggccatcacgtgcaatgtaggtgtttccctgcttgggaaggacagtttccaggagatagacatcacgggcataacaatgcccataacaaagcataactttatcgtaaaagatgtaaagaacctggcagagacgataagaaaagcatttgtcattgctcagaagggccggccaggtccggtccttgtggatatccccaaggacgtcaccgccaacaaggcagagtataagaagcaggagatcgccccggtgacagcatcaaaggacatctgtgaagcagagatcgaaagcgcgcttaaaatcatctcaaaatccaggaagccgtacatatttgtaggcggcggggccgtgctggcagacgcaagtgaagaactgtacgaatttgtgaaaaaggtggatgcgcctgtcacagacagtctgatggggaaaggagcgttccctggaactgacccgctctacacagggatgctcggaatgcacgggacaaagacgtcgaattatggcgtgagcgaatgtgacctgctgatcgtgatcggcgccagattcagtgaccgtgtgaccggaaatgcaaagaagtttgccaaaaatgccagaatactgcagtttgacgtcgatgcggcagagatgaataaaaatgtactgatcaccgatggagtcgtaggcgatatcaaggtggcgctcggtatgatcaacagaagacttgaggaacagagccatccggagtggatcgagaagatcatggcttacaaagaacagtatccgctgaagtatcacgaagagggtctgacggggccgttcgtcgtggaggagatatacagacagacagaaggagacgccgttatcgtgacggaggtgggccagcatcagatgtgggccgcacagttctataagttcacgaagccgagaacatttctcacctccggcggccttgggacgatgggatacggacttggagcctctcttggagcgaaggtcggcatgccggataaaacggtcgtcaacatcgccggggacgggtgcttccgtatgaacatgaatgagatcgccaccgcggcccgctataatattccgatcatacaggttgttgtgaacaatcatgtgctcgggatggtacggcagtggcagaacctgttctacgggaagcgctattccgccacagtgctgaacgacagcgtggattttgtgaagctggcagaggcgctgggggctacaggcgtacgcgccgcgacaaaggaagagttcaagtcggcgtttgcatcggcgcttacgctcggcagaccggtggtcatcgactgccagatcgattccgacgagaaagtgtggcctatggtggcgccgggagcggcgatcagcgaggctttcgacgagaaggatctggaagaaagaagcaattgatttttactgaaaaagaaagtggaggaatgaaaagtgagcagagtgtataatttttcagcaggaccggcagtactgccggaagaagtgttaacggaagcagcggcagaaatgcttgattacaacgggaccggcatgtccgtgatggaaatgagtcaccgctcgaaggctttccaggagatcatagactcggcagagtctgatctgagagagttgatgaacattcctgacaactataaagtattatttctgcaggggggagcatcccagcagtttgccatgattccgatgaatctgatgaagaaccgtgtggcggattatatcgttaccgggcagtggtccaaaaaagcttacgccgaggccgcaaagtacggcaaagccaataagatcgccacatcggaagaccggacattttcctatattcctgactgttcggaccttccggtgtcagaggatgcggactacgtgtatatctgtgagaataatacgatctacggaacaaagttcagacatctgccggatacaaaaggcaagccgcttgtggcggacgtctcctcctgctttttatccgaaccggtggatgtcacgaaatacggcgttatctacggcggtgtacagaagaatgtcggaccggcgggagttgtcatcgttatcataagagaagatcttataacagacgatgtgctgcccgggacaccgaccatgctccagtataagacacatgtggatgcaggttcactttacaataccccgccggcttacggcatatacatatgcgggaaagtattccgttggctgaaacgtcagggaggtcttgccgtcatgaaggaacgcaatgaaaaaaaggcaaagattctgtatgactacctggatgcaagccaaatgttcaaaggcacggtagaggcaaaagacaggtcgctcatgaatgtgcccttcgtaacaggaagcgatgagctggacgccagatttgtgcaggaagcgaaggcggccgggtttgaaagcctgaaaggacaccgcagcgtgggcggtatgcgggcgagtatttataatgccatgccggaagagggtgtgaaggctctcgttgcatttatgaaaacgtttgaagaggagaatttgtgatcatgtataaatatcattgcttaaatccaatctctgatgtagggttggaacagtttacagaagactacatccctgtcagtgacgcgaagaccgcagatgctgtgctcgtaaggagcacagccatgcatgacatggagtttggtacggaactcaaagcgatcggcagagccggggcaggcgtgaacaacataccgcttgaacggtgctcagagaacgggatcgttgtatttaacacgccgggagcaaacgccaacggtgtgaaggagctggtgatcgccggaatgcttctcgcttcccgggatatcatcggcggcatcaactgggtgcaggaaaatgaggaggacggcaatatagccaaagacgcggagaaggcaaagaaggcatttgctggctgcgaactggacggcaagaaactgggagtgatcggtcttggcgccatcggtgttcttgtggcgaatgcggctacacacctcggcatggatgtgtacggttatgatccttatgtatctgtcgattcggcgtggagactttccaggagcatccgccacgcaaagacggtggatgagatatataaggactgtgattacattacgatccacgttcctgctcttgagagcacaaaaggcatgatcgacgcagatgctttaaatctcatgaaaaaaggaatcgttgtgctgaattttgcgagagacgtacttgtggatgaggaggcgatgatagacgcgctgctgtcaggccatgttaagcactatgtcacggacttcccaacaccggccatggccggagtaaagggagcgatcgtgataccgcatctcggggcctccacagaagagtcggaggataactgcgcgaagatggcggtaaaggagatccggaattatctggaacatggaaatattacgaacgccgtaaattttcccgactgtgatatgggatacaagggaagcaacacgagaatcgtgctgctgcaccacaatattcccaacatgctcggccagtttacaaaagtcctggctgaggataacctgaatatcgcggatctggccaacaaaagcaagggtgaatttgcctatacgatgatagatatagactcagaagtgccggccggcgtgacagaggaactcatgaagatcgaaggggtgagaagagtaagaatcattgaataattcttaaaaaagctgtatactcaacataacaggggaaatgttgtttattacaggggagacatacgaatgaaaaaaagaagaatacataagagacgccggaataacagaggaagagcagggacctttttcagggttcttgctcttcttgtcgtctgtttgatgcccttccttctgtttcggacagcggcagcggcacagcgggaggaacagatcatcatcaaagccgtatccggcgagatactgcagggggaagaactgtctgagcctgctgtgcaaatatacgcagatggcagcgaaaaagctgtgctcgacaaaaaaagcggatacacggcgggagacttgctgaatgacctgaaaagcggaaaaggctacacgctcaaatgtgaagcggacgcgtcactggaaggcgactatccggtagagatagttctggatggtgatatgagcagcgctttaaaaaacgcgtggatcggtctcgtttccatcaagacggaagacggactcatccgcgtgaaaaatccggttggagaatgggaaggcagcaagttcaggcgttacgacggcaattatgtgctcagtgatttcgtcgtatcaaaggggaatacatattattttgacggagacggcaataaagtgagcgggcttaccaatatagaaggcgctgtatattattttgaccgtgacggcatcatgcagacaggctggcaggagatcgaagaaagccgttattactttacagataaaggcgcggcggctgtgggctggcaggaactggacggagcgacctattattttgacaaggaagcaaagatggcgacgggagaaacatatctcgggctcaccctctgtctgtttgataaagacggaaagctgctgtccaaaaaggaaagcagcatagacccgaacaggccgatggtcgcgctcacttttgacgacggcccggggccgaggacaaaagagcttctcgatgcgcttcagaaatataatggccatgccaccttctttatgcttggtcagaaagttccctcatacgcagaagtggtaaagcggatgaaggaacttggatgtgagctcggcaaccattcctatgaccatgcggacttgtcaaagatggacgcggcaggcgtacagagcgaggtggacaagacgaacgaaaatatcagtcaggcggcgggacagggagccagcgtgatgcgtcctccttacggtgcgataagcagtacgatgaagaccacgatagggatgccgatgatgctctggaacatagacacgcttgactggaagacacgggacgcgcagaagacgatcgatgcggtcatgggaagtgtaaaggacggagatatcattcttatgcatgatatacatacggagagtgtggatgcggcgcttgagcttattccccggcttatggacgaaggatatcagctagtgacggtgtccgagctggctgccgcaaaaggaaatgaattgcagaacggcggtgtgtatacggatttttagacatcgttaaaaaatgcacaaaacgaaggtgcataaatatgcaaagtttgttaaaaatttatctttacaatatctccggttagtgttaatcttttaacggaaagaaaaataaaagattaacataaaaggaagtgagattcgatgaagaatttagtttctgctttaaaaaaatactttacagaaaatactgctcttacaacttacatggagaagcactgatcataaagtattgagagggaaaaaagaagccggacccgggagcgggttcaggcttcttttttgtggagagagctgatctcacttttttattttcctgcgttatgccgttccagcagcgcatgtatcttatcggttgggtttaagacagaaccgatcgtaatgtcgtgattcagagaatctataatgagggcgatgaacttgctcagatccgcaacgacaaagtacggtttctcataggctgcaggaggaaggtaagtaaggtttgtcgtaatgaccctgtcgatgtagccgctttcataatagtcgtcaaacttgtcaaaaccttcggtgaacagtccgaatgtcgtacagacgaacacccgtccggctcctctttccttcagctgctttgccacgtcgagcatactttccccggaagagatcatatcatctacgataatgacattcttgcctttgatgtcgtcgccgaggaattcatgggccacgatgggattcttgccgccgacaacagtggaataatcacggcgtttgtagaacattcccatgttgacgccgagtacattggagaagtatacggcccggtgcatggcgccttcatcggggctcactaccattaagtgttccttatccacagaaagatccggttcggctctaagcagcgctttcatgaactggtacggcgggttaaagttgtcaaagccctgtagtgggatcgcgttctggacacgcgggtcatgggcgtcaaatgtgataatgtcacttacacccatttccatgagctcctcaagagcgagggcacagtcaagtgattcccgtttcgtcctcttgtgctgcctgctttcatacagaaacggcattatgacattgatgcggtgcgcctttccggtggctgcggagatgatccgctttagatcctgatagtggtcatccggagacatgtggttcaggtggccgttcaccgtgtaagtaagactgtagttgcagacgtcgaccataatgaacagatccttgccccgaatggactctccgataatgcccttggcttcgccggtgccgaagcggggacatttacattcgatcagataattttcaagctggtagctggaaaagagcggggagtcaagcgattctctcaatgtttcctgacggaaccggacaatataatcatttaccttctgtccaagttcccggcagctttcaagagctgcgatcttaagaggtgctaccggaagagcttcttccattagtttaatattcggcataatattctcctgtatctcaacaatattttggaccggctgaacatctgcagtccaatatgtatacacattcgtacaacttatttatatcaccttttccatgagatggtcaacaccctttcgccttcgggtggactattttcggaaggtggggtataataataaggctaagataaaataaaaccgaggagtttatttatgagacatgaacatatcattaaggaaattgtcccgggaagcattgcagaggaaatgggaattgaacccggggacagactgctgtccgttaatgataaaataatagaagatgtatttgattatcatttctgtgtaaatgaagaggagcttgtcgttctgatcgagaagcagaacggggaagagtgggaactggagattgagaaagactatgaggaagatctggggatcgaatttgaacagggactgatggatgagtaccgttcatgccgcaataagtgtatgttctgttttatagaccagatgccgggaggaatgagagacacgctctattttaaggatgatgattcccgcctgtcgtttcttcagggcaattatattacactgacgaacatgagtgaccatgatattgagcgcattgtgacatatcatctggagccgatcaacatttcctttcacacgacaaatcccgaactgcgctgtaagatgcttcacaaccggttcgcaggtgacgcgctgaagaaagtggacagactgtatgagggcggcatcacgatgaacggacagatcgtcctgtgcaaaggcatcaacgacggggaagaactggagcggagcattcgtgatatgtcccgttacctgccgtatctgcagagcgtatctgtagtgccggtagggcttacgaagtaccgggacggactggaaccgcttgaaccctttacccgggaggatgcgggggaggtgctggacatcatccacaaatggcaggacaggctttacgaagagcacggacttcatttcatacatgcaggtgacgagtggtatatactggccggacaggagatgccggaggaggagagatacgacggatatcttcagcttgagaacggcgtcggtatgctgcggcttcttgaaaatgagtttgaggaggcttatgccaggctggacggcgacaaaaagataagggaagtgtctgtcgccacgggtctgctggcagagccgtacatcaggaagctggcagagcggctgaaggagaaatatccgaatacggcggtacacgtatatccgatccgcaatgagttcttcggggagctcatcacagtatccggattgatcaccggacaggatctggtaagccagcttaaggggagagagcttggagagcgtctccttctgccgtgcaatatgttccggagtgaggagagtgtatttctggatgatgtaacacttgatgaactgaaagagactttacaagtccaggcagatattgtaaaatcaagcggacaagattttatagaagcaataataaggtaagaatggatatgcatatagattaggagaataagtatgagtaaaccagttgtagctattgtggggcggcccaatgtaggcaagtccacactttttaatgtactggcaggcgagatgatctcgatcgtaaaggatacgcccggagtgacgagagaccgtatatatgctgaggtcagctggcttgacaaggaatttacgctgatcgataccggcggtattgagccggagagcaaggatgtgatcctgtctcagatgagggaacaggcgcagatcgccattgatacggcggacgtcattgtttttatcacagatgtgaggcaggggcttgtagattcggattccaaggtggcggatatgctccgcaggtccggcaagccggtggttctcgtcgtaaataaagtcgacagctttgataagtttatgccggatgtatatgagttttataatctcggcatcggggatccggtgcctgtctctgcggcgtcccgcctcggcatcggggatatgctggagcgggtggcacaatttttcccggagcacagcagtgaggaggaagacgacgaacgtccgaggatcgcgatcgtagggaaaccaaatgtcggaaaatcctccatcgtaaacaaactgctcggggagcagcgcgtcattgtgtctgacgtggcgggaacgacacgggacgccatcgatacggagatcatacacggaggcagagaatatgtctttatcgatacggcaggactgcgcagaaagagcaagatcaaggaagaactggagcggtacagcattatacgtacggtgacagctgtggaacgcgcggatgtggtcctcgttgtcatcgacgcggctgagggcgtgacggagcaggatgccaagatcgcgggaattgcccatgaacggggcaaaggtattatcattgtcgtaaacaaatgggatgccatagagaaaaatgacaagacgatgcgggaatatgaacaccgtgtcagacaggttctttcctttatgccttatgctgagatcatgtacgtctcggcggagacgggacagcgcctgaataagttgtatgatatgattgatatggtcattgaaaaccagacgctgcgcgtggcgacaggtgtgctcaatgagatcatgacagaagcggtggcaatgcagcagccgccttctgacaaaggaaagaggctgaagctctattacattacacaggtgtcggtgaagccgcctacctttgtgatctttgttaatgacaaggagcttatgcacttttcttacacaagatatctggaaaataaaatacgtgaggcatttggctttaaggggacttcactgaaattctttatacgggagagaaaggaaaaggatcgttagttatggaacgcttgatatgtgtgatgatcggttacgcatttggactgctgcagacaggatatatctacggaaaactgcaccatgtcgatatcagaaagcagggcagcggcaacgcggggacgacaaatgccctgcgcacgctcggctggaaagccggcgccgtcacttttctgggggactgctttaagtgtgtattcgccgttattgtagtacaccttatctttggaggaacacatggagatatcatgccggtattgtccatgtatgccggtatgggagcggtacttggacataattatccgttttatcttggatttaaaggtggtaaaggaatcgccgccaccgcggggctgatcgtcagtacggtgaacgcatggatggtgctcatctgtctcgttgtgtttgtgggacttgtggcgggcacccggtatgtctctctcggttctctggcagtggtcatcgtatatctggcagaagttgtcgtgtacgggcagacggggggattcggcgtgtccggcagcagtctgtgggagatgtacggcatagcgctttttctcatgctttccgcattctttaagcacagggcaaacattaagaggttactgaacggaacagaaaataaactgggttccgggaaaaaataaggaggatgtattatggcaaaagcaggtattatgggtgcaggaagctggggaacggcactggcgctcctgcttcacaagaatggccatgacgtggctgtgtggtccatcaacgaagaggaagtaaagatgctctccacaaagagagagcacgagagcaagctcccgggggtaaagattccggacgatatggaatttactacggatatggagtccgtcatcagaggaaaagacttccttgtactggcagtgccgtctccgtatacgagaagtacggcgcgcagtatgaagccttttgtcgcccagggacagacgatcgtggacgtggcaaaggggatcgaggagacgacattgatgacgctctcccagcagatcgaggaagagatcccgcaggcggatgtggcggtgctgtccggaccaagtcatgcggaggaggtcggcagaggccttcctacgagtgtcgtgatcggagcgaggacgaaggagacagcagaatatctccagggaatgtttatgagtgaagtgttccgcgtatatacaagcccggatatgctcggcatggagctgggcggttcccttaaaaatgtgatcgctcttgcggcaggtatcgccgacggtctcggatatggagacaacacgaaagcggcgcttatcacgcgcggaatcgcggagatcgcaaggctcggagtgaaaatgggcggagcgatcgaaagctttaccggcctgaccgggatcggggaccttatcgtcacctgcgccagccagcacagccgtaaccgcagagccggatatctcatcggacagggcatgagcatgcaggaagcaatggatgaagtgaagatggtcgtagaaggagtatattccaccaaagcagccgtgaagctcggtgagaagtacggcgtcgctctgccgatcattgatgaggtgaacaaggtactgtttgaaaacaaagacccgagaacagcggtcaatgaactgatgctcagagacagcaaggcagaacacactgcactgccctggaaggagtaattggggattttgttggggatgtttggaggtattggcggtggacggcaaaggggacgggcgcacatgactgtggaagcgcgctccggcaggcgggaagccgtaactgcagaatgagccggaaacggacaaccgagcctattcggaatgaaatcctgaagggatttcttccctcagaggctctcgggaatgttatttgtgataacattcccgtgtctgtttccggctctttctgcagcaacggcttccactcacagtttggcgtgttctgtgacgtatcttttgaaatcgatgatggcgggcgcctggtatacatttttcagggtggccatgtagaagagacgttcccatgcgggctcgtgtatggcgatggtatgtacgggcatatagccgagtatttccattctcggtactaccgctatgccgaagcctgcgcctacaaggcctgccactgcctggtcttcttccagggagtagacgatgtcgggctggccgccgcactgttcaaacagatggtcaatgatgggccgcaggccgctgcgtttggaaaatacgatctgcggataggggagagtctcttttagatctatctcatggcggccggaaagcggatgatcttccgggacgatcacaacgagttcctgcctggcgaccggcgtgaattctatcgccggctcattttccatgagagagcagaaggcaacgtcataccggcgctcctttacgccctgtataatatccggcgtcaggccggtggaggtgtgaaagtaaaagtctatatttttttccggccgggtatcgagaaagccccggacaaactggggaacgaccgatgtgctcagcgtgcgcagaagcgccacgtcgatccgtccttctcccgaaccggtcatctgcagcttgttgatactggaatccagcatgccgagcgcctgttctacgtcagtgaggaacgcctggccgcactttgtcagaaccacatttcttccttctttctcaaacagctttacacccagttctttttccagagaggcgatcgcgtggctcagacttggctgggttatggcgaggatctcagcagctttcgtataatgttccagatgtgccagtgtaacaaaatatctgagatgatacagattcatatgcgtctcctttcgtcttttatcgacatgtccacattctaacataacccataaacaaaatctatgaattcggctaatattaccaatttgtttttaatttaacgatagaatataataaaaccatagtaaaagtaacaagattgaacgggtaaaatataagaatcatgttcaatttcaacaacggaaggagaatgtaatatgtcaaaaaaatatccaatcacaatcagttcctggacgctgggagaccagtgcagatttgaagaccgtgttatcgccgccaaagaagcgggatatgaggggatcggcctcagggcggaaacatatgtggatgcgctcaatgaaggattatatgatgaagatatcatggcggtccttgaaaaacacggcatgaaggttactgaggttgagtacatcgtacagtgggcggaagataaccgttcatatgagcagaaatataaagaacagatgtgtttccatatgtgcgatctttttggcgtgaaccatatcaactgcggcctcatggaaaactattccgtggagcatacagcacagaaattaaaagaactctgccacagagcgggaaaacggatcattggtgtagaaccgatgccatacagcggcattccggatctgaaaaaaggctgggaagtagtcaaggcgagcggatgtgacaacgccatgcttattcttgacacatggcactgggtacgcgcagatcagccgtatgacattcttactgaagagatcgcaaagaaggttgtttctatccagatcaatgatgcgtacgacagaccatatgcaaagacgatcttgagagacgagtccatgcacgacaggcttgcgccgggaacaggagcaaaagacacggcaggatttgtaaaaatgatcaaagatgcgaaaatcgaaccggcagtagtaggcgtggaagtgatctcagacgaaatcctcgcaaggggcattaaagaggcagcggcacatacatacgacaacacggtgaaagtgctgagagagacatggccggaagtggttgaagattgattgtttaagagaaagtgaaagagagagggaaaaatatgaaatttgacaatatgttttcaccaatacagattggtcctatgactgtaaagaaccgttttgtagtcccgccgatgggaaataatttcgccaacacagacggcacgtggagtgagcagtccgccgcctattacgcagagcgggcaaaagggcagttcggcctcatcacgatagaagccacggtcgtccacgagggagccaaaggcggaccgagaaagccttgtctttacaatgacaacagtattgagagtctgaagaagatcgtggatgcctgtcacgcagaaggagcaaaagtgtctgtacagctccagaacgcggggccggaaggaaatgcaaagaatgcgggcgcaccgatccaggcggcaacggcgatcccgtcgacattcgggcgggacacaccggaggaagtgccggctgctcaggtatatgaactcgtaaaagggtacggggaagctgcgagacgcgcgatgcaggcaggggctgacgcagtggagatccatatggcgcatggctatcttgtgaattcctttatctcccagaggacaaataaacgggtagatgagtttggcggaagttttgagaacaggatgcggttcccgcgccttatcattgaagaagtgaagaaaaatgtaggggataaagtggccatacttgcccgcatcaacagcgcggacgaggtgcccggcggtgtggatgtacacgacagcgcggcgatagcggcctatctggaggaatgcggcgtacagtgtcttcatgtttcccgcgcggtacatatcaaagatgagtacatgtgggcgcccaccacgatacacgccggtttttcggcagagctggtgacagagataaaaaaggcggtctccataccggtcattacggtaggacgctatacagagccccagtttgcagaactgctcgtgaaggaaggacgcaccgatctggttgcctttggccgtcagtcactggcagacccgcatatgccggagaaggcaatgcaggagcgtctggaagacatgatcccttgtatcgcctgtcttcagggctgcgttgcaaatatgtacaaaggggagcctatctgctgtctgacaaatccgttcctcggacacgaggcggaaggttatccgaaggcagaacaggctaagaaggtcatggtgatcggcggcggtgttgcaggcttatgcgcggcgtttatctgtgcggagagaggccatgaagttatcttatacgaaagcacgggcaagctgggcggcaatatgagacttgctgcttatccgccgggaaaaggcgatatcacaggcatgatcagaagctatatcgtaagatgtgaaaaagccggcgtaaaagtgaagatgaatacggctgccgacatggacacagtgaaggaagaaaagccggacgcagtcattgtggcgaccggatccaaaacattgatccttccgatagaaggtattgatgatcctgccatcatccatggttccgatctgctggaaggcagacgtcaggcgggagaaaaggtactcgttgtgggcggcggaatggtcggctgtgagatcgcggcatttctcggtgaacagcagcacaaggtgagcattatcgagttccgggattccatgggcgcggatatgatcacagaacacagaaagtatgtgatgaaagactttgaggaatacaagatagagcagatcgtcaacgcaaaagtgtgcaagttctatgaagacggcgtggaatacgaatcaccggacggagtaagacatgaagtgagaggatttgattcggtcatcctttccatgggattcagaaattacaatccgtttgcggagcagcttgaggagctcggacaggaagtatacgtagtcggtgacgccacaagggcgcgcagggcgctggatgcgactaaagaagcatatgcggcggcaatgcagatctaagcagaatactggagggaatgaaaatggaaaagagaatatcaggacatacaggtttaatggcgctgttcgggacaccggtggggcactcaggctccccggccatgtataacttcagctttcagcatgacggcctggattatgcttatatggcatttgacgtaaatgtggagcagatgccgaaagtattcgaggcgatacgccttttgaatatgcggggcggaaactttacgatgccctgtaagaatgtggcggccaagctcgtagataagctgtccccggcggcagagatcatcggcgcgtgcaacgtgttcgtcaacgatgacggcgtgatcacaggacatgtcacagacggtgtcgggtttgtgaaaaatctggagctcaacggagtcgatgtgaagggtaagaaaacagtcatactcggagccggcggagcagccaccgccattcaggtccagctggccctcgacggcgcaaaggaagtgaagatattcaatcctaaagatgatttcttcgcgagagcagaagggacaaaggcaaagctggctgacagatgcccacagtgtgttgtgacggtagaagatctgaatgacaaagagaagctggcggaggcagtgaataactgtgatatcgtgatcaatgcgacgatcatggggatgaaaccgtatgatgatgtgtcgcttatcgacaagtccttgtaccgcaaagacctgatcgtggcggataccgtgtacagcccggagaagacaaagatgattcttgaggcggaagaggccggctgcaaagcggtcggcggaaaaggaatgcttgaacagcagggagccgtgaactatgaattatttgtgggcaggaaaatgcctcttgaggagtatcagaagttccagaaagaaaataaataatcgtttgtttttatagaagaaagaataggagaatgaggatgaaagcaaagaagtatattctatcattggtgacagtctatatgtgctattttacacatgggattcaggccattatcctgtcacagaacaaagtaaacttcttcacgcaatggggatacacagatgaagtggcaggggcagcggccgtatcgcttgctataaccgcaaccggttttggtaaatttctgaccgtatggctcggcggggaagtgtcggataagatcggccggaagaaaatggctgtggccggaggcatactgtatatcatctgttttgcaggcctgctgttttccactaattttacagtggcatgtgtatgtgcgttcctcgcaggcgtggcaacatccggattctgggacgcatccctgtatccggcggttcaggaggcagctccaaagtatgcaggttcggcgctcatcggtatcaaggcgtttgtgtctgtgtccggtattatctatccgttaatggctgtacatttttccgcggccggcaactggaagataaatgtctggattccgttgattctgtctgtcgtttgtgttatccttgcggtgatcgctccgtttgtgtatgacgaccagatgaaagagaccgtgaaaacggccgacggcaagacgaccaatgcggcgcaggcagaaattgatgcggccaaggctcgtatgaaaacaaaaccgggcggacttgtaaactttgtcacgatgttctacggcttcatctgtatgttcatcatgtacggtgcacaacagtatacaaaggctttcggtatgacaaactgtggattgtcggagatgcaggcggcaggcatgacgtccatctatacggcaggctccatcatcgccgttgtattctgggcgatcatgatgggcaagctgaaatggaatccgctgaaagtagtgctcattgattccgcatttacggctgcggcgctggccatcgtacttctcgtcaaaaatgtaggcgttgtctatgtagcgatcgcgcttctcggattctttgcagccggcggtgcgctgcagacaggacttggcgtccgtcaggagatgtgtccgggaccaaagggaagaaatacgggtatctactatacatggatggggctggcaagctgtttccttccttacatagtatctgcaatgacaaaatctatcggagaaacgtctgcgatctacacgatgatggcactgctgcttgtcgcgtcagtcatcgccgtagtgatgatggcttatctggtagcacaatataagaagatatttggaaataacccgcttggaaggcaggaagcgtaaagtcttcttaaactctgctcttgatcgtgagggcagagtttcttacaggcatatattgtttgtctattaacgaacgataactgccatatcatgagaatgaggaggttgcacagatgagtgcaagaagagaaaaaaatccgaaagagctcccttatattccactcgggccgtttcagtggaggatcccgggactgcactaccgcattgaacaggtggaatttttccaggggcttgttctgggcgccaccgcgctcagttccattccgtatcttacggactatcttgggatcccgtatgaactggcgtggagctgcgtcatcatagaggtgttcatgtacatgcttcacggctggctgggagacccggtcgtgccgggctggatcacgcctacgctgccgtttaccctggcgtttatcaccggatttgaaaaaggaccggagagaatccaggctatgatagcggtgcagctgctcgtggcgtttgtatttatcttcatgggagtgacaaagctggccgacagatttgtgcgaagcgtgcctacctctatcaaaggcggtatcctgttggcagctcccatcacggtcatacagggacagcttgaaaaagggagccagcttctgaccgctcctgtcgctacgctggcagggacactgctgctggcttttctgagcttttccccgttctgcgagaaaaagagagggaaaataaagctgctggatattatggcaaaatacggcaacctgttcccgtatctggtcgccatgctgctcggtgtactgcttggggaacttgcaaagcctacgctggagcttggaagtatcatccgtattccggattttggaaatatattccgtaccgtcagcgtattttctgtcgggtttccgcccctttccatgttcatacaggctatgcctcttgcattgatctgttacgttcttgcgttcggtgatttcgtcacgtctgagacgctcgtgaaagaagcacaggagagccgggacgacgaatatattgatttcaattcgagccgctccaatttgatcagcggactgcgcaaccttatcctcgctctgttcgcaccatttccgccgctggcaggaccgctctgggtcggtgtgacggtatcggtggcggtgcgctacaaggaaggaaagaaggcgatgaaatcgctgatcggagggatgagctccttccggatggccacatttttgagcgttattcttgttccggtcgtctcctttatgaaaccgatcatgggagtcggttctgcgatcacgctgctctttcaggcttatgtctgtgcgaggatcggcatggaatactgcaagtcgaacacggacaggagcatagccggaatcatggcggcagttctggcctttaagggttccggctgggcgctgcttgcgggatttgctctgaattttcttctgtccaacatggaatttcagaagaagaagctcggtgtgccgacgacggcggagctggaagtgatagaaaaatcgaaagaagaagagataaaagcgcttgcggcaaagaagtgcatagaaaattaatcggaataatacccccttgtaacgcatacacttgtatcagcataacaagggggtattcacaatgaacacgtttcagctgtacaaagatatacaagccaggacaaacggagaaatatacataggagtcgtaggaccggtgcgtaccggaaagtctacatttatcaaacgtttcatggatgtgctggtactcccgcatatggaggatgagcatggaaagtcacggacgaaggatgagctgccccagtctgcgtcgggcaggacgatcatgacgacagagcccaagttcgtgccgaaggaagcggcagagatcaggctgtctgacgatgtgtctgtaaaggtgcgcctcatagactgtgtgggttacatggtagaaggcgcgtccggccatatagaaggcggggaagaacggcaggtaaagacgccatggtttgattatgagataccatttacgaaggcggctacgatcggtacgagaaaggtgatccatgaccatgcaacgataggaatcgtggtgacgacagacggaagcatcggagatattgagcggcagggataccgggaagccgaggataagacgatccgggagctgcagagcatcggcaagccttttatcgtacttgtgaattccaaaaagccatatggggatgaggccagagagacggcgcaggagctggagcagcagtacggtgtgaaagccatgccggtaaactgcgaacagctgaaagaagatgacatctaccagatcatggaggcggtgctgtttgaatttccggtgtcggaagtgcagttcttcattccaaaatgggtggagatgttaccgagagaccacagaatcaagcaggatatgctggaacatatccgggctgtcatggatggcttaggtgagatcaaagatgccgctgccggagtggaaaaaccggaaagtccttacataaatgacatgaaggtagaccatatagagatggataccggatgcgtgaaggtgagaatagacatcgccgataaattctactatgagatgttaagtgaactgacaggcacgccgatagcagggcagtatgagcttatcacagcgatgaagaacctgtcggagctcaaggatgaatacgaaggagtaaaggatgcgttcgccgcagtccgcatgaaaggctacggagttgtaagcccgaagaaagaagagatcacgctggaagagccggtcatcatcaaacagggcaacaagttcggagtcaaaatacactcagaggcgccgtccatccatctcatacgcgccaacatagagaccgaaatagcaccgatcgtcggaagtgaacaacaggcggaggatctggtccgctacatcaaggaagccggtgacacagaaggcggtatctggagcacaaatatattcggaaaatccatcgaagatctcgtgatggacggcatgcagaataagatggctgtcatcaatgacgagagccaggtaaaactgcaggatacgatgcagaagatcgtgaacgacagcaacggaggactcgtctgcatcatcatataaattgtcagataatttaatgaattttgaaaggggtcagacccctgcggcatgcaggggtctgacccctttcaaaatttactgccgggggtggaatttgactgcatttttatgttatactcttttggagactgcgcgatatgcaatctatttttacgatgggagttttgtttatgaatatgaaaatactgaggcagcttggaatcatccttgcgctctgtctcgcggcggaatttgttgtatctctgcttccgatcgcctttccaggcagtgtgacggctatcctgatactggcggctctgctggggcttaagatactgaaagaggggcatattaaggagactgcggatttcatgctgtccaatatggcgatcgtgtttgtgccggtatctatcggcatggtggaggatatcggactgcttaaggggcagcttgcagggttcctcaccgttgtctgtatctctcttattctgacgtttcttggtacatatgcctcagtgaggcttgttcaggtatgtatgggcaggctgtcgggaaagggaggtgcggctggtgcgtgagttatgggcgaatcctttgttcggggtgttcctgactgttaccactttctatatcggcgactggacggccaaaaagataagatcaccccttgccaacccgctgcttatcgccatggtactctgtgtggcggtgcttaagcttctgcatattccgtatgaggattacatggagggaggacagtttatctcactgtttctcgtcccggcgacggcgatgatcggtctgtctatctaccggcagagggaagtgctcagacagcagtttttccccattgtcatcggatgccttgcgggcagtgtcatatccatgggaagtacgatcgtgttgtgcagggtgctggcgcttcaccaggagatgctggcatcgcttttgccgaagtctgtgacgacggccatcgcgctcgatctgtctgaccagctgggcggtctgcgctctgtcaccatgatggcagttatcatatgcggaacgggcggcgcgatcgtgcatccgtttatcatacgtctgctgaggctgaaagacccggtcgctacgggggtggcattcggcacggcgagccatgcgataggtacggcgaaggccatcgagatgggagaggtggaaggcgccgtgagcggtgtgtccatggggattgcaggaatatgcaccgtaattattgcattatttttataaaagcgttaatattttactatatgactacgttaagagaaaaatatggaggtacagtatgaaagttgcgattataacagcgagtacagagatatacaaagggaagaaagaagatgccggaggcccggtcgtaaagaaaatcatggaagatgccggacacagtatcgtgttcatgaaagcactgccgagtgaccgcaaggtgatctccactgtcatgcagcggatggcggacgcccatctgactgacttgatactcactaccggcggagccggctgcgcgccgaatgattatacgccggaggcgactatggatgttgtggacaggccgatcctcgggataccggaagccatgcgcgcgttcacgatgcaggtgacgaagcgttccatgctgaaccggagcgctgccgggatcaggggagatgtgcttatcgtaaatctgcccggcaatgcgaaggcggtcaagcagtgcctcgattatctgcttcctgagatcactcatgcggtagaagtcataaaaggagtataaaagtattgtatgaaaataacatatttgaatcacagcggttttgtccttgaactggaacatgatgtccttatttttgattattacagaggagagctccccgcgcttccaaaggaaaagaacatatatgtattttccagccatgcccatcctgaccattttcagaaaaaaatatatgactgggacaaaatgtacggcggcatcacctatattttatccgatgatattcagacggagggcagaaacgagaggatcatccacgtggggccgaggcaggaacttgaggccggcggccttcatattaagacgttccgttcgacggatgaaggcgtggcgtttctcatccgtacagagggaaagacgatatatcacgcaggagatctgaactggtggcactgggaggaagaaggaccggtgtacaatgagatgatgcgcaggaattaccagcatgagatcggaaggatggaaggcgaaaggatcgatgtggcatttgtcccgctggatgcgagacaggaagaacagttttactggggcatggattattttatgaagcatacagaaacgaagcgggtatttcccatgcatatgtgggataagtatgaggtatatgaatggctgatggataaggaagaagcggcggactacagagacagagtcatgcatattacgaaagacggacagacatttgagatataggagagagataatatgcaggtaaaaatatatacagacggcgccgccagaggcaacccggacgggccgggagggtacggcacagtcctggaatacgtggattccaggggagagctgcacacaaaagaactctcacagggatataaaaagacgacgaacaaccgtatggaactgatggcggtcatcgccggtctggaggcgctgaaccgtccctgtgagatcgaactgtattcagactccaaatatgtggtggatgcgttcaaccagcgctggatcgacggatggatcaaaaaggggtggaagcgcggcaagaatgagccggtgaagaatgtggacttatggcagcggctcctgaaggcaaaagaaccgcacaaagtcacatttatatgggtgaaagggcatgacggccatgtgcagaacgagcggtgcgatacacttgcgactacagcggcggacggggacggcctcataactgacgagggagtctgacagtcgaagcggctttacaataagagaagagtatggtaaagtatgaggtgcaagtaagacaggtaatcgcagctgcagaggccgaaaggccgcaggtgaggaaagtccgggcttcacagggcaggatgccggataacgtccggtggaggcgactccaaggccagtgcaacagaaatgtaccgcccagagtatctgggtaagggtggaagggcagtgtaagagactaccgcctctctggcaacagagagggcacatgtaaaccccatccgaagcaagaccggataaaggcattgtggcggcccgccacgccttaggtaggttgctggaacctgctggcgacagcaggtctagatagatgattactcaacgacataacccggcttatcgtcttgcttgcctttaaacgtggtattttataccatgtttttctttttatagacgcaattgccggcagtaaaagtgtgaaaacggagggatggatatggcggcacaacgtgtagtaagattattgcaaaagcagacgtttacatatgaaataagggattgtgaccgagattttgaaagtacggaagattctataaagcttctgtctgtgccggaagagaagatcgctaaaacactcgtgtttgcagcccctataggcgccagtgtgatcatactgtcgggggatgcgaagatagatcccggcaagtatgaaaagcagtttaaggtgaaacggatcgtcctggatgaggaagatctgatggaatataccggatgcaggccgggggccgtaagtccgatagcgctcccggggaaaagggcgaaagtatatatggatgtatccctgcagcgttttatggacgagtatgtatacacgtccggaggcactggaaacagtgcagtcggcattacggcgcgcgacttatatgaagtgaccggatgcaggcagtggatagatatcagcagcggctggaagagaggagaggacgaagaatgaagaatattgtagtgataacgggaagtccgcgcaagaacggcaacagtgagagaatggcaaatgcatttatcaaaggggcgggaagcaaaggacaccggcttacgacgatcagcgccgcggagcttaacattcagggatgcagagcatgtgacgggtgctataagaccggccatccttgcgtatttgcggatgatttcaaccatattgcaccggcgcttctggaggcggacgtcatcgtatttgccacaccgctttactggttcaccttcccggaacagataaaggcgctcatagaccggttttacgcgctgatgcggggggatatacctttcaggggaacaaaggaatgcatgctgctcgtgtgcggggcggatgaaaaagcggcatttgcgggcattgtgaagacttatgagattatggcagattacctgaaatggaaagacagaggacatgtgatcgcggaaaaaacagaggagaagggtgacgttgataagaccggcatcctggatgagatccggcgcctcggcgaagagatataaagaacaagcggagtggccacccactccgcttgttgttacagatcagcgttcatcatatttttcttcacagtatttgcagcggtaaacttctttctcagggtctgtcagaacgaagatatgatccagctcctgttcaatggaggtgatacagcgcggattcttgcaccggatgacatttgtgatctcctttggcagttttaacgcttttttatccacgatcttctggtctttgatgatgttgatcgtgatattgtggtctataaaaccgaggatgtccagatcgataaaatcaatgggacattcgatttttataatatcttttcttcccatcttgctgctgcgggcattcttgatgatggcgacacagcagtccagcttatcgagcttcaggtgcttatagatatccatgcttcttccagcctggatatggtccagaacgaacccctccgaaatactgcctacattcaaagtattttcaaccatgacaattccctcctaaacttcgatttccagtaatgtaagtatgagagccatccgtacgtagacgccgtactgcatctgcctgaaataggcggctctcgggtcgtcgtcaacttctacggagatctcgttcactctcggaaggggatggagcacaaacatgtcgtccggtgccagtttcatcttcttggcatccaggatgtagaagtccttcatacgcacataatcttcctcattgaagaaccgttccttctgaacacgcgtcatatagaggatgtccagcttaggaagtgcttcctcgaggcggacgacctcctcgtaaggcacattcttggcatccaggacatcattgcgtatgtaactcggaagtctcagttcctcgggtgatatgagtataaatttaattcctgtgtaacggacaagcgcgtggataagtgagtgcacggtacgcccgaattttaaatctccgcacagtccgatggtcatgccggacagatgaccttttaaagagcggatcgtcagcaggtcggtcagtgtctgtgtcggatgctggtgtcctccgtctccggcgttgatcacagggatggaagagtggcggcacgccaccataggcgctccttctttcggatgacgcatggcacagatatctgcatagcatgaaatagtacggatcgtgtctgacacgctttcccccttagcggcagaactggaatcagcggtagagaaccccatgatattaccgcccagattgagcatggcagcctcatggctcagccttgtcctcgtacttggctcataaaataaagtggccagcttctttccttcacacgcatgcgcatatttttcgggatctgcttctatgtcattggccagatccatcagtttatccaactcttccaccgaaaaatccagtggactcatcaaatgtctcataaaaacctccttatcgatatgtcaataattctttcacagattttcttccgggcgcagccggttcgaccgcgggccggccgactgcgatcagcgcggcaagctcctcgtcctgcggtatatccagcagcatgcggatcccctgctcatcccagatccccatgatcacagttccaagccccgcgtcatgtgccgcaagacagaacgtctggcacgcaatacctgcgtcgaacatctgccagcggtcttccttggcagtcgtaaaagaaccgtcgcgttcaaaaccacagataccttttacaaaagtaactgcgacgagcagcggtgcctgctttacgattctggaattgaattccgggggaaaatgagtagcgatagtatcaagaactgaaggatcttcgactgcgatataacgggtgatctggctattcttccaggacggcgaataggatgcggcggatataatagattctaacagagaatgttccacacgttctggtttgaacctgcggatgcttcttcgtgtcacgatgcattccttggtattcatatcataatcctcccatattgaaaatctttcatatatcatataataaatacgaaagattttcaacttctggacaggattttttcaaacagcagtccggcgccaaaccaaagcggcgcataatcaaggcggacgaggccgttaatattcagcggcgccttgctgtaatcccacggacaggcgtcgatcctgcgcaaaacagacccggtaatatattctccgacaaaaatgcagcatgtgtatacacctcctctaaggaccgggcttttgcctttcaggactttgcagacgggcgaaagaaaactggccataccgtagatcgggaacatccagatcgacgtgttgcccatcagtgtgggatttttttctttataggaatggaggccggtgaaaagaatctccatacaccagcccgccgttccacaggagagaaaattatgtttcatacgatgtaagtatgtcaatggacagtagattttatgcatgaaatgtattataatacagattagtttgcaagaaggagagagaaagatatggcagagctattagagctgagagaacagttggatgaaatagatgcgcagatcgtggaattatatgaaaaacggatgaatatctgcgagcaggtgggcgagtacaagatcgcgaagggaaaaaaagtattcgaccgccagagggaaaagaataagctggcagacgtggctgccagagtgagcagtgattttaacaagaaagggatacaggagctttaccagcagcttatgtccatgagcagaaagctgcagtaccagcagcttgtgaaggcaggggctcttggaagactgccgtttatagaagtagactcccttgagaagagtacggcccgcgtcgtgttccagggagtggagggggcgtacggccaggcggccatgcagcagtatttcggagaaaactgcaacagctttcacgtgcggacattccgcgacgccatggaggcgatcgaggaggggtctgccgactttgccgtgcttccaatcgagaattcctctgcgggggcggtaaatgaaatgtatgacctgctcgtggagtttgaaaattatatcgtcggagagacgatcctcccggtcacacatacacttgcggggctgccggggacgaagctttcagatatccagcgcgtatattccaaggcggaggcgcttatgcagacctcgcgttttctggacgttcacgcggactggcagcagatcagcgtcgtgaatacggcgatcgcagccaaaaagattctggaggatgcggacaggacgcaggcggcagtctgcagcgcttacgccgcaaaggtacacggcctgtctgtgcttgtggaaggtattaatgatgaagagaataattttacccgctttatcgttgtcacaaatcagaagattttcaggaaagacgcggataaaatcagcatctgcttcgaggtcgcccacgagagcggttccctgtatcatctgttgtctcactttatatataatgaccttaacatgacaaagatagaatcccgcccggtggaaggacgctcatgggaataccgcttctttgtcgattttgaaggcagcttaagcgacggcgcggttaaaaatgcgatcagggggctgagagaagaaagccggagtctcagaattctcggcaattactaggcaaggagaaaaagaacatgagaacaaacgaactgatcctctacaaacatatggaacaacagcagatcctggacgatatgacgttccttatggagaattttgacaatgaatattataataaagaagatatgagaagtcttctgttcgacgtggtcaatgagcttctggaacttgcggtcagccatggatttgaggggaatctgtggcatgattatctcacatatctgcttgccagtgatgagaatgcgtacagcacctcctgtgagatcgtcgggaatgtggacggcagcatcaatgaggcggcgcttcatgattttgagatctttaaggaactgtttgactatgatttctcggcgatggaagaggaacttggagcggactgtctgtcatttatccacaattacagcggattcggcgatgaacacggcaaggtgttcaatacgaggatccgcagccgtatatgcggccttggcgaagcgctggccggcgcggccggcggaagagaatttaaggatacggtgacccagttctacaaggagttcggcgtgggcaaactcggacttcacaaggcgttccgcatagaacatacggaggaaggggccgagataattccgataacgaagattgcccatgtccatctcgatgatctcatcggatacgagatcgccaagaaaaagcttatcgataatacgaaagcatttgtggaggggaggcgtgccaacaactgtctgctgtacggcgatgcgggcacaggcaagtcttcttccgtcaaagccatcctgaaccagtattacgaccagggactgagaatgatcgaaatatacaagcaccagttccaggatctgaacgctgtcatatcacagataaagaaccggaattacaagtttatcatttacatggatgatctgtcttttgaggaatttgaaatcgaatataaatacctgaaggcagtcatcgagggagggcttgagcggaagcctgacaatgtgcttatctatgccacatccaaccgacgacatctcatccgggagacatttaaggacaaggcggacagggatgaggagcttcacacaaatgacacggtgcaggagaagttgtctctcgtggcccgtttcggcgtcaccatttactttggacggccggagaaaaaggagttccaggatatcgtgctaaaacttgcgaagaggaatgacatcggtctgccggaagaagaattgctgctggaggcgaacaggtgggagttatcccacggcggactctccgggagaacggcacagcagtttgtggattatctgctcgggatgaaataagagtagattcactgcgggaaccatgttataatgtgtaaaagtgcacaggcggtatttgtatggaatggtacggggctcaacaagataatagagtaaagaatgtcacagaacttcaagttctgtggcattttttatgtttaaggactttcccatacatttaacggacaacaaaggaggaaaagaatggaacacacactgtatattatcaaactgaaaaagaatgcagggtttaaaaaaggtgcagaggcgattcttaaaaacgcagaggaaagctatcttaagggatgcgaaaatatatatattctgcatgggcttaacaatgataatttcaaagaaaagtatgacgtgaaaagggacgggacgaaagggatcgcagcgctgatctgctatgaagaaaataacggggagttgtgcaaccaggaattgtatgcggggtactgtgaggtgaactctgaaggggaaaacaatacgataacttacactatgcttctgcatcttaaggatcaggatatgattcataaccttatggataaattggatctggatctgaaagcggactatgaaagcagcagttacgtgatgatcaaccattttactgaattgatccgctcctttgaagatctgctgatgaacagtgacatggtgaaagtgcaaaaggaagaggaggaatttgtacgggagccgccttctgtaaaagcggacattccttatgaactgcacagactggcctgccatgacagcgaatgcataagaagataccgcatagaggaggacagagaccgcgcggcttttcaaagagacagagaacggatcgtcaacagcaaggcatttcggagactggtagataaagcgcagattttcagcgcaaagaaaggagaccattaccggacgcgcatgacacacacgctggaggtaaatcagatcgcgaaggcgatcgcttatgcgcttggcctcaatctggatctgacagaggcggtcgcacttgggcacgacctgggacatactccatttggccatcagggggagagaacgctgcaggccatcttgtctggagagctttcctgtatcaaatttccggcggataaggacaataaggaaaagcgccttggatgcttcggcggattcaagcataattaccagggccttcgcgtcctgaacaaattagaagaaaaatatgtggcccatgaaggattgaatgtaagttgccaggcgatggagggggtattgaagcacacaaagctgaaggaagaaatagatatctgtgattttgcctgcaaagagacagtggcacacctgaaactccaggaacggtttatgggcagaaagaaagggtattatatctgctctacgctcgaagggcaggcggtggcgctggcggatgaaatagcacagagagggcatgatgtggacgatgctatctcctccggaatgatttcggtagaagaactgatcgcgcatctggatttgtataaatactgtgatatacgcaaagaactgcaggaagagaaagccatgtttgactcgtacgcacgcacttatatatctgacagagaattgatggcaggaaggatggtgtccgcaattgtccattattttatcaacggagctatctgttacagcagagaacagatggagaagtatgaaaggccggatgatggcagcatagacagggagctcattaccctgtcaaaagctgactgggacgtctgcaaatatctggaacagatgatcaacaagaaagtgatatccagtgcggaagtcgcaaggtttgactacacgggagacaaaattgtctttacgttattccgggattactacaacaatccgcgtctgctgcatacgggaacgctgcagagaatttataacgacatgttgaagcatgaggatgaagaagtcagagaaagggcaatacatcttggcacaggcaacattgacatagtaaaagaagagataaaatctatcgttgaaggggaaatcagccctgttgcccctctggaattgaatgatgaggaattcgtccggtttgaaaaaaggaaaatactcgtacgaaatattacggattttatagccggcatgacagacagttatgcgctgcaggaatataaacgtctgaatccgtgatatagcgttatgagggggaaaaggtgttatgaaaaagaaaaatatttgtatggctttggggatactgagctggagtatcggaagccactgtacggcatatggcgtgctgcggggaatagcagaaggcggggcggtactcgtatccggaataaccgtcgtatgcttgtatcttgcgggagcagttctcatggggacggcagtgtttatggcaatgccgaagaagaatatcagagactctgccaggagacttttgttacttggaggaggttatgtgctgcttcagctgcttctaagcgttctggccggcgtgtttgcgtggacgcttgggagggtgagcagcctggagagcagccagatcaagacagtgacagatatcgtgtgcagaattgtacaagtgccggtccgggcagtgatattagtaattcttctctatattattaccggtatcgagagagaacacagaattatcacgctgaaagcggccgcagcctgcgccgtgtatatgctcgtacagtggtcgatggaacggctggggacaggcctgcccccgcttgttgtcagaactttgctttctgccgcggtgaccactgccctatggcaatatatctgcatggagtacaaaaaaggaggcggggctgatgagacggttgagaaataatgctgtcggaaatcgaatgagacgtttccttgctttgggtataatgcttacgctcattttatctcaggacgtgctcgtccttgcggaagagattcgggataaggggcaggagaaggtagaagaatggaaagaagaacagcaggcggaagagacgaggaggcagcagcaggaatacatagaagagaataaggccggtgcttcagaggaaacagaggatactccggatagtccgggcggacatacagagcaggaaacagataccgggacggagaaaaacgtgaaatcaaacgaggaaattccgtccggagaaaatgccggatgggaaacagtccgccagcctgagctggagggcatgcgggcggacgagctggaggcctgctatggtgaaccggcggaagtatatgaatacgggaaagtgtttcaaacaggtgaaggcagctataaatttatcagcacgcaggaacctaatctgtatcgtggcaaaggaggagaactgaaagaaatagacaatacgctcatagagaaacagcagaacagccgcagaagccttgaagcagacgaaggagatataacatactatacgaacagagcgaacagtatggatgttgtgctcccctctaaaatgagggaaaacaggggtattatactcacttccggacgtggggatcagttggagcttatgccgctggacggcgactacggaagagtatccgtgctggagaacgctatcttatacaatgatgtgtcggataatgtagatatacaatatactgtgagaggggacagcgtaaaggaagacataattttaagggaaaaagagacgcggcatagtttttcctactccttttcggcgaaagagtatgaagcggaattagaaaacaatgttatatcaatctgggaacgcggtgtaaaagaagctgagagagaagtgcttttttatctcacagcgccaattatgacagatgccgcgggggcggggagtgccaaagtcgtgatggaactggaggaaattgatggccggtatgtcctcaccgtgtcaggggatgaggaatggctgtcatcagaagacagagtatatcctgtaaagatagaccctacgattacgattcctgccgagaaactgtccgttgtcacgactacgagcaagacgggaaaatatgcagcctctgcctttggttatgtaggatatgccagtgaagccgtgacaggggtgagaggaggagaccttggaaagacgcgtatgttctttcagatcaactataacatgaagaagctcataccggaagaagctgcagtacaaagtgcatatcttcatatgtatgaatattctgcctatgcaagttctgcgacttatgcctgttaccgcttgaagcagaactggagtccggcttctatcacatgggagaactcggtcggtatcggcagggaaatagccggtgaaaatgcgacggtaagagcaggaaacggctggaagaattttgatatcagacagagcgtgaacgactggtcggcgggcattgcgccatcttacggcctcatggtgatggcgaaggatgagtcacagtggggggctgcattttttacaccagactccaacacttccctccagcctacctttacaccagataagaagccttatatagagattaactggacatatccgaatcccgtggatccagcctattcgcttgataagacgacggtgagtctgcgctctatggttgactgcgatatgagcggcaggctggagttccagggggtatttgcagacgggcttgcgactccggaatctgtagtgtcataccagctgaacgatgcttccaaaaaatacggcgccaacgtaccggcgggacacacaaaacggtatcctgacagtaaatcatttgagggggctttttccaagacaactacaagataccgggacaagcaggggaactggcagacggtatatccttttgtcgacccggaatataatgtgctgtaccagatagaagcctcagcagcaaaaggcgggaagacgggaaggaaggcggtttctgataaatttacggtatataaggtgaagcaatatgatactctgccgaaaatcgccagttattacgggatacccctcagccagatcagtttcgataaccgggtacaggacatgctgctcgtcgccaataataccctgttcatccgcaatccgaagaagaatgccgagaaaccatacaacccgccgcctctggatgacaaagcaaaggcacagatcgatgcacagctgatggggagagggcttcattgtgaatttggatttgagccggtgaatctgaacacaggcaacttttatctgacacatatagatgccagtgtgcctgattatgtgggagaattttcgatcgagaggaattataactccaaaggagcctcatatgtaagtcctttcggccgcggatggcagttttcgttcggagaatatctgtccaaaatggaagacggaacgctcatttatacacggggagacggcagttccctgtactttaccgaaaaagaggaaggaatatacaagtgcccggaaggctatgatctgaaacttaaaagattaaaaataagagagaaagaatatgactttgggacagggaaagtaaagtatccggtatatgaatatgagataacagatgcagataatacagtgcgccgtttcgactgctttggaagtatgacaaaggttactgacgagaaggggaatgctactgtactgtcttatgataagaattataatcttacctctgtcacatctccggccggaagcgtgtatgcatttacgatgacggaggacggaaaggtggcgcggattgtgctgccgaacggcgggaaactgtcttactcttatgatgatgacaataatctcatacgttatacggatgcagccggagcggtgactcgctatgaatacgatgacaggcatctaatgactgcatggtatgatggaagagacaactgtgtgactgccaatacatatgacagcgatggccgtgtcatacgtcagaaggatgccggtggaaatgaggtgggccttacatatgagaaagataagacggttactgttgacggaaatgggaataaaacagtctatacatatgatagtcaattccgcactacgtctgtattgtacgcagacggcacagaggagattaagaaatatgaagggaaccgattggtgcaggaaacagacgagatgggccatacgactgagtatacgtatgataccgacggtaataaaacgaaagagacgctttataatggagtctcccgaagctatacgtacgacggggaacatcatctgctcagtgagacggattacggtgggataaaaacagaatacagttatgataaggccggcaatatgacaggggtagtgaagtcagggacagaactaagttcctatacttatgacagcagaggtcgtgttacatcacagaaagatgctctcggaaatatgacccgctgcacatatcaggggccgtggcttgagagtataacaaacccacttggcagcaggataacatttacctataatgcaatgggaaaggtgacaggaaagacagacggaaacggtcatgctgtcctgacggagtatgatctggaggggcggatcatccgcgagacagacggcgcgggaaatacaataacttatacactggatgagaatgggcaggccattgcgtgcaaagacggcaatggcaatacgacgacgttcgtatatgatgtgcttggcaatcttatatcaggcagcgatgaaaagggcagctcctttgcttacacatatgatggaaatggcaactgtataaaagaaactgacgcggaaggtaatgtgacggagaaatcatacgacagcagagaccgtctgatcagcgagacagacgggagaggaggtacgtttacatatgcatatgatgcgcttggaaatgtcataaaagagacggatgcaaagggcggcagtatgtcatacacatatgattacgctacaggtaaaaaagcgtctgacacagatgaaagcggtgcctccattgtctatgaatattccgcagagggacagcttcttgtgcagcaatatccggatagtacgagagaaacttatgaatacgatgtgtttggacgggagataaagcggacagaagtaaatgatcttgtcatcaggagcacttatgataaggcaggtaatcttacggagatagataaggaaggcgtgataacttcctttgcatatgatgccgccggacagctgacagagatctgcaatccgaatggaggcacagaaaagtttgactatgacgatgccgggaatattgtgtgtaagactgatccgctcggatatgaaatacactatgaatatgacggagcagaccgccttgtaaaatacgaagatgccgcaggagcagtaacggtatatcaatatgacggcaatggaaatgtcgtttcagagactgacggaaatggaaatacggctaagacagaatacaatgcattcaaccgtccgtcggctttcatagacagtctcgggaaccgcacgtcctatacttacggaaggaatgaagagttggaggctgtcactgacgcatcgggcgggaacactgcctatgaatacaacacacaggggcttccggtgaaagtgaccaatgcgtcgggcggcagctatcagatctcctatgatgccaatggcaactatacatctatagaagcgccggacgggggaaggacgacttattcatataacagactgaaccaggttgtgaaggaagaggatgccgaaggcttgattgttgagtatatctatgatgtgaacggcaatgttatgaagcagtgggataataacggcggaaagagcgaatatacatacgatgctgccggccgtgttctcacagaaacagatgctctcggcagggtaactgcctatacctatgataaatatgtcaatctggtcaggatgacagagccagacggcaatgagactacttatacctatgatgtcatggggaatgtaagttctgtgacagatgcagaaggaaaactcacagtctgcgtatatgataaaaatagtcagttgatcaggaaggaggaaaaggaccacatttatgagtatgcttatgacgggacggggcggctcataaaagagaaagatccgtcaggcggcgaaatagattatacatacgataaagtgggaaatcttttgtctgttacagatgcacttggtaacaaagagacatatgattacgatgccgacgggcagatcattggccagacagatgccaacggtaatcttacaacgatggaatacgacagtattggacgaatcaaagtgtctgtatcggccgaaggaggcagagccttctattcgtatgacggcacagggaatcttctgtcttacacggacatggaaggtgctgttacctcttatgtatatgattctatgggccgggtaacggaaaagacgatgcctgaagggggaacatacaaatataaatataatacgcatggaagtgtgcaggaagaacagacgccggaaggagacacgacaacttatgaatatgacctttatgaccggctggtgaagcggacacttccaggaaaggctgtttatggatatgcatatgacgccctcgggcggatgacacatctggaagcgccagaaggccaggaaaagttgtatgcatatgataggtccggcaatctcatccgcgagactgaccagtctggcaggagtatatgttatgcctacgataagatgcatcgtttgacaaagacaagtaacccgctaaagcaggagacatcttattcgtatgacaagtacggcaacctgaacagcatcgtaacgccacatgggcataagaccgggtatgaatatgatgcgatggacagaatccagaaaataacggatccttccggaaagataacggaacttaagtatgatatggcgggaaatctgaagcgcatggaggaatacggcggaaagagcctcaaagcaggaaggaaagacagccggataacgagctatacgtatgatgcggcgggaaacaggacatccgagacaaatcctctaggtgagacaacgagttatctgtatgatgttatgaaccgcataagggaagaaagcaatgcggcaggacgaaagacagagtatgaatatgataagaacagcaatttgactggaattgtcaatgcaggtggaggcagagtccggttcgcttatgacagtgatggtaatctcaccggactgactgatgaaagcggaaggaaggccgcctatgcttatgacagatccgaccggcttatagaagctgcggttggagtgggtacagaagaagcagcatctgttaggtatatatatgacggccgcggcaatctggtgtctcgtacagatggtaatggcaatacttccggttatacgtataatctgctcgatcagatgactgcgcaggtaaatgctcttggtcagaaggagtcgtatacgtatgatgataatgccagactgtcacaggtaaagagagcatccggccagacgatacggtacgagtacaataaactggatgagttgatccagaaaacatactcggaagaggaggaaggggaagtgctattggcctatgaccagtcagggaatcgggtgagcatgaaggatctgacgggtgactcctcgtacacgtatgacaacgcgggacgaattactggtgtgaaaagcggtgacggaagtatcgttctatatcattatgacgattatgggaacatcagtgaaattatatatccggacgggagcagtgtggcttacacctatgataagctggaccggcttaccgccgtcacagaccgcagaggtgagaagacgttatataaatatgatatgtcggggtgtatgacacagataaaacgtccgaacggcactaaatctgtcattacttacgatgagctggaacggctgacagacattcagaatgttgacagtgcggggaaagtgatctcctcctatacatatatgtatgacccgggcggaaatatactgacagagatcatccggcaagaagataaggaaacgaaatgggaatacagatacaatgcgcgtggagagcttcaaagtgccgccgccaccggtgcggtaacagagacgataacttacggttacgataaggcaggaaataaagtgcgtatcagccgcagcaccggaaatgccggagcgcatatggagcagtcagtaaaagagaaccgtttcagtccggtcaaccagctgctggagagtcgtgacagcagggcaggtacgacgacatacgagtatgacgctgacgggaatatggtgcgtgaacttgggccggacgaaaaggtgctgacttacagttatgacacggagaaccggctgcgcgccgtaaaggacagcagaagcctgcttcagtctgcgctttacgacggagacggcaaccgtatcttcgttgtaaaccgaaggatagtgtcggaaaatggaccaatttttaagaaagggcgtatcggaagcgggccggagagaaataacggacgttccggggaagtacaggacaattcgacgggagagtccggcaagaagccgaaccatccggcaggcagtagttcagatagcaaagaagagagcagcttctggtacggcttcttccagaatatgtcgcagggcttctctgtcacagatttttccgtcagtgacgcactgcatcgttattgggataaaatcaccagctgggtccatatccacattttgggggatgagccggatgaagaagggattataaaaaacccggtaaaggtgctgcccgagccagacagagcagaaaccctgcctgagacagaggaaaaaaaacaggatgcgctgtacaatacggtactgataccttacgggatagaggaaaatgattgggatatgtatgaggcaacctgctatgttaacgatgtgaaccgtgagtatacagaaatattgatggagcatgaaccgtcgggaaatattcaggcagtatacgagtacggcgaccgtcgtctgagcagggagaagggaaataaaacagagtattatgcctatgacggcagagggtcggtggcaaacctgactggcagacaaggtataaatatggtatcttataactatgacgtatatggagagtcagcggcgagtgtgaagacagacaatccgtacacatttaacggcgagtatacagatgccctgaccggaaatcagtatctgcgtgccagatattacaatccccggacaggtatcttcctgacggaagacagcgagcttggaaaactgctggagccggtaacgcagaatcggtacacctatgcagggaacgatcctgtgaatgtaaaggacccgagcggtcatggattcttaagtaaactggcgcagtcgattaacaacacagccaacaaagttaagtcatactatggcatcaagccaaagcccaaggcaaagagcagcaagaagtcctcctcagtcagcaaatctcagaataagaaaaacggttacggcaatatatacgcagggccggaatatggcggttatgccggatatctgaaaaaccggggcaaaagtaatcaaatgagtctgggacaagcggcgcgcaatgtggtacggatagggaagaaactggtggccagatatgagaaaaagagctgtacgactgcagataaagcaaagaaacaaaaggcagcggcgagcacaggaacattggttggcgcatccgtattggatctgctttggaattccggtaaggcggcagtcgtcggaacaggggcacgtgcggcggcatcaccctatgtggtagtggggggaatagtcttcttaacagtctggtggatgaatccgatagaggcaggtgaatctgaggaggatgtaaagaaggcgcagaaaaagtgggaagaagctgagaagagtaagggagacagtgacaatagagaatataaaaaaccgaaatcaggaaaaggtaaagccaagtcttccggcaaagaaaaggcagatgatgtacctgattgggcaaaacgaagcggtgaacgtccctatcaggatgagagtggaaaggattttgcgaaaagattactagatgataaatatggaccagaaaactacgataaaggtccaaacagtgagtttaacaaaataaaaaaatggggagacagagcatttgagtagctgtttaaataaggaggtgaaaatattgaaggattactatccaataaagatactaagacatgaaaaggtttatttttgtatatggtatactaatgatgttgatggcattcttctggaaaaaaacaaaataaaatccttttctaactatgataatttaaagaattattgtgaagaaaataaaataaagattaaggaggatatcagcacatataatttggacgaagttttggaatggctttcaagtcgcaaacaagaagttaattgtaaaataattttggatttatggaatttaatatctgatttagcaaaatcatctgatgaatacttttatggtgatgatgacgaaacgcttcatatcagtgaaaagttattttatggtaataatttacctgcaattaatagagatggtccagaatattatccaaaatgggatgatgatgaatatatgattataaaaaaagtaatccaaaacggtgtagagcttttcaataagtatttatatgaataatagtttaaagcattctttagatattataatacgtatggccgaatagactaataaataaatttttccaaaaagttttggggatttttccttaatcctcttgattaccctaaacagtagaaaagaacaggcagtcaaagggcttgccacgaagtggtggaacacccttgacggactgttcttttctactgtatcttctgggagaggataaggagttttttgctatgtggtggagtcgatatccgcacttttttgtatgaaggatattgtactttagatatgtaccgctggatatgtaaaggttgtttaacgatttcgaaaatttatttcattggaaggtgattacaaaattagaatagacccacttgatagtaaaatggattaccggcatcgacataattatgatgaagaagagaacagtttggataaagatggaaacaatgtagacagaaaaagccctgatggtcatgttccatatgatgaggattaagtaggaggaaaaatagtatggatattaaagatatacaaaaaaaattgataatatagattattgtgattgcaagattatagattttcaaattaattactttggagatgaagtaaaaatagtagtcgaaggagataacaaagttgattttataatcaaatttttgaagtgctacaaggttgaatatgaaacagatgccaggagtagatggaaagacatggaagttaggtccatgaataaatcacaattagaatattttgcacacgatataaacataaaggatagtgaaattgagggatttattgaagcgaatctggagataccgttcttatttgcaaagataatatgtaaagacatttctatcaaacaagttgaacataacgatggtaattacttttagtcaacgaatgtttaaaatgtggcatagttattttaaaatctcttggtgactagaaacaacaagaaacgggtgccaaagaatggtggaccaccacagtggataggctggctgcctagataggagagatgaataaatatgatggatattgaaccaatacatgatgggaattgtgataaactaatagaaagacagttgcagattacaactttaccaatgattagatatgaatcagtatttgatttttatgctgaagaaccgcattcaataactgttcaaaaagaaagcatcattgaaagttatgaaccaattataaggtttagaaaatggaatgttcagaatgagagtttttcatggagcatatattctactaatagagaaaagttggataatattgtaattagaaaagtcgtgtggaatattaaaaaagataaagagtttgctcaaaggaatattaaagaaagaagacaggatgtattactaaaatggccatcaattacaactcataatatttttatcccttcaagatattctaaagagattatagagaaagtagaccaattagataatactataagacacggtatattgctatcgaaaaacaatgatccaaattgggaatggagggattttgagattaaaagattatatgattgggggcagatacataatacatggtcgacaaatatgaagaatcaagatgttgagaataatattgttgatttagagatggttctgaatacttatattacagacaaatgcaataatgcagaaattatttatttaaattattctatattgccatcaaaatataaagaaatgttggaaggagaacaagatgtgtaggtaaagggaataaaatgagcaaaaagtttacaaataaaaataaggcttaaatctcttggtgaccagagacaacaagaaaatattctgtcaaggagttgccactttagtggtgtggagcattctttacagggcgtgtttttgtgtgtatgtttcataataagatgatttgctaaaaatgcaatatatttattttaatcggttagagttatagtgaacggaaaaataaaaataatataaaaaaactgcaaaggtgctgcctgaaacaaaggaagaaaaacagagtactttgactatgacagcaggggagcggagacaaaccggactgacagacaaggtataaatatggtatcttataactatgacatatatagtgtgtcagcagtaagtgtgtagtcaggcaatacgtatacatttaacggcgagtatacaaatgccctaacaggaattcagtatttgggtgtcatatattacgatcccagggcgggcatcttcctgacggaagacatccagaatatggcggttatgccggatatctgaaaaaccggggcaaaagcaatcaaatgagtctgggacaagcggcgcgcaatgtggtacggatagggaagaaactggtggccatatatgagaaaaagagctgtacgactgcagataaagcaaagaaacaaaaggcagcagcgagcacaggaacattggttggcgcatccgtattggatctgctttggaattccggtaaggcggcagtcgtcggaacaggagcacgtgcggcagcatcaccctatgtggtagtggggggaatactcttcttaacagtctggtggatgaatccgatagaggcaggtgaatctgaggaggatgtaaagaaggcgcagaaaaagtgggaagaagctgagaagagtaagggaactagtggggcttctgaacaagaagcggcggaaaaggcaaggcaggaaggcaagccaagagaaaaacataaaacaaagacaggtagaagtggtgatttaaaaacaaaaggtgagccaaattctagtgaagacttatacaacgaaaatggcgaacttctacaaagaaggtattatgataaaaatggtaatgtagagtacgatatcgattataagcatgacaattctcataataatcataaatttcctcacggacatgaatgggaatggaaggacggtaaacctataagacattaaatttaggaggttgagatggaatacaaaagtattgaaacacaagaagatattgagatattcatggcagggtttaacgggtttcatgatagctgtattaaggaactgtattattatagtggcggttatgtcagtgtagatagagcaatgtacccatttaactctgtacgaagcgtcagtattatttttcaaagccagattagtgaacatccggcaattgaaatgagatttgagttaattcatcagttgaatttgcaacctagacgagaagattatgattgtattatttatgatgcttctttagtcaagataggcgaattgttttattggagtgagtggggcgaatttcaattagaagacattggtattaaaaaggggacatggctgtcagcagaagaaattaaatggagagcacttgaaaattcattaggtgagagtaaagtgtattcaaatgtattggatgaggaaccagattccggataagaatatagcttaaatctcttggtgaccagagacattaagaaacacattctgtcaagaacttgccagccaaagctggtgcgaagcattctttacaggatgtgttttttggtgtatgtttcgtaaagagatttaagaaatataaattaatctgttgaaaatgcaacaaatttatcttgctcggttagagttatagtgagtacaaaataaaagtaaaaaaatgaggaatgtttatcctagctacaagaagtttttccatgaagtagaatgccggacatcactggctttttatgaacaatatccatcccccagtcatttacaggcagtaacagaagaggagttagcagaatttttgcgattccatagtcataatacctgttcgattaaaagggctgttgaaattatatcactggtcgaaaaagacgtgattaaagaaagagagtatcagtatgcccgaaatggggcaatacaaagcatcgtcagaaatattcgcttcaataatgaagaaatgaaacggattgagaagatagaagctgaaatgctaaaggaactgaattatcaattggaaacaataccgggagtgagtaccgtgactgccagtgcattagtggctcaaattggagacattaagcgatataaaagtgcagataagttgtgcagtttcgccggagtagcaccgatctatcaggggagtgccggaaaaggaaagaattatcaaaacaaaagtctgggaaatcgggaattatatcatgtattgtatttcttggcgattcagcaggtttatattgataagaagggataggcacgtaacccagagatgcgtgcttactttgagtacaaaacttccaaaggaaagacgaaaatacaggcattaatctgtattatgcgaagattagttcggattgtatttgctatgatgaagtataaaacggcatacgaaatgccggagattaaaggcgattttaaagagaagaagatatcttgacgattgcaaatgatcggattgcagaagaaggggatatatggtaagattctttcaggagcaatcgttgtatagaggtgcgttgaccttccatttttaaagagatgggaggtgatgcgtatggacaagaaaccatttgattttaaagatttaatggctttcggaatgttcattctggcattgctgaccttcatttatttgattagtcagtaatacatagaaaacccgcctccatactttgaccagttgaggcggattttcaaaatcttctttaaggtcaaccatttcatggaacgattgctctttttgtataattatcgtagcataattagatgaaattttcaagcaaaatcaataatgattaaaagtgtggtaaaatgtagtaaatacaagggttttggatacacctattgataatgcggcggatgtgctatttggaaatgaagtatatgatgaattaccagataatagccttattcacagattaaaaagagtagaatattttttggataatatactcacagagcaagggataaataagatacttctcgatatcaattactatgaaaagccagtagagtataatttgcaagtaaaaagtacagattttgccaacgaaattataaagttgtatgaagaggatagtatatctgtgccagttatcaaggtgatcgttgaaagatgatgaggtgataaacattagtaaatgtgtagagacgatattagacatatattatggtgaggaaacaaatttcaatattagaatatgacttaaatctcttggtgaccaaagacaacaagaaacacattctgccggtgatttgccacagaagcaccgcaaaacatccaggacagaatgtgttttttgtgtggattttaatatttaccactctttaatccgcctcttcaatctcagatatatcggaatcgatcaccaaagaataattcgtataatatacgacaaatcccggctttgcgccgtttggtttctttacatgcttcttttccacatagtcgatctccaccttgtcgcttccccggtttttggagtagtatgcggccaggcgtccggcctcctcaaaggtccggtcgggaagttcatctccgccgcttttgacgatgacgtgggaaccgggggcgcctttggcgtggaaccaccagtcgctgccggatgcaaagtgaaacgtaagttcatcattttgaagattgtttttcccgacatacatgtgatagccgtcctgagagacgaagtggagaggacggctcatgatcttgaccttcttttttgtgtatttcctgcggatatatcctgcctgcgtcagttcttccttgatctgcagcaggtcatcttcgttctgagcgatatcgagggagttgcttatggattccagataccggttgtcatcggctgtatctcctatgagtccgctcagggcctcgtaagtccgcttctgtttattgtatttattaaagtatttctgtgcgttttcctgaggggtgagattcttatcaagcggtatcgtgacggtttcatttgtataataattgagggcggtgagctcggacgcatcttccggaagattataaccgtacgtgttgatcaactctccgtataccttgaatttgtctctgttttctgtatccctcagctgacggagctgcagatcatatttttttcggctccgttccagtgcagtctgtacgacatgacgcaggtcggcggacttctgccggatgcgggtcatcgtatttttgaccgcatagtaggtggagagcagctcggatacagaagtgaattcctgccggcggtatgctgaataatgactgacaggaagagcggaaaagtctttcgggtcaccgccgctgtaatagatggcaggggtgaaggaaccttgttttacctgctcaaaataataacagaactgacggtacaggtgggtcatcatgtcgtccgacaggtcctttgcggtcatggaagaatctagccctgcaaggcagcatacttcctcggcagcgacagggcttacgccggtgtaacttaaataaattgcctttccaagcggcgcgggcctgtctcttagtgccgccgaaaagcctgcaaggtctgtatttaacgggtcctgcttttccatcgtatccggaataaaatactgccgtccgggcaatacttcacgcacggaactcatttgtgcggatacgtgcttgatactgtcgattatcatacctttgtcgtcacagaagatgatattgctgtgcttccccatgatctccacgatgagtgttttccggcagaggtcgccgagctcatccagatgttcgatatcgatgtggataatgcgttccagcttcggctgggagatgccggtgatcctcccgcctccgatatgctttctgagcagcatgcagaagccgggggcggtcatgggactcggtttgttgtcactggtcagatatataagcggaagtgaggcgctggcagagatatagagccgtttctgccctccgggggtttttaccgtgagcagcagttcgtcgctttccggctgggcaatcttggcaatgcgcccgtctgtcaggttctcctttaattcttttaccaaagcggaaattgtgattccgtcaaaagccatgtcaatactccctttccattttctgatatgtctttggattccggggcgtttgcatcgtgcaccgggacactaaaatgattatacaggacttgggaaatagaggcaaggaaacaattgacgtaattttgcaaatagattataataaacgatgattgttatgaaaaaatagcagaagacaatacgacgaaaatataaaagaggtttatatcatgattaagagtatgacaggtttcggacgctgtgagattatggaaggtgagcgcaggttcaccgttgagatgaaaggtgtaaaccaccgttatctggatgtgaatatccggatgccgaagaaactgaacttttttgagacttccatccgcagcctgctcaagaagtccatactgaggggcaaggtagacctgtttatcacatatgaggattcttccgaaaaccaggtggctttgaagtataacgagacactggcgggggagtaccttacgtatctcagacagatggaggagaccttttcactggagaatgacatccgtgtatccacgttatcacgctatccggaagtgatcacaatggaggagcaggccgtcgatgaagaagagctgtggaacgggctcaggcaggcgcttgacggcgccgtaaagcagtttgtggagacacgtacgctggaaggcgggaacttaaagaacgatatcatcggcaagctggatggaatgctggagcttgtcgcatacatagaagaacgctctcccgagatcgtggcggaatatcgacagaagctggaagaaaaagtccgggagcttctcgaggacacccagatggacgaaggccgcatagcggctgaagtcgtgatattcgcggataagatctgtacggacgaagaggtcgtaaggcttagaagtcatattgaacacatgaaggaaacgctgaagtctgaggaggcggggataggacgcaagctcgactttatcgcccaggagatgaaccgtgaggcgaatacgatcctttccaaggccaatgacctggaagtttccaaccgggccattgatttgaagacagagatagaaaaagtccgtgagcagattcagaatatcgagtagagaggaagttatctatgaataagaaaggaattcttaccgttgtatctggtttttccggcgccgggaagggaacgatcatgaaggaactgctgaagaaatatgacaactatgcgctgtctgtctcagcgactacgagagcgccgcggccgggtgaaactgacggccgggaatatttcttcaaaacaaaagaagaatttgaaaaaatgattgcacaagacgaactgatagagtatgctagttacgtgaataactattatggaacgcctaaggcatatgtagaagagcagcttgtagccggaaaggacgtgatcctggaaattgagatccagggggcgctcaaggtgaaggagaagatgcccgacacgctgcttttgtttatcacgccgccgtccgtggaagagctcaggaaacgtctggtcggcagaggcactgagacgatggaggtcatagaatcccgtttgaaacgcgcaggcgaagaggcggaaggcatggacagatatgactatcttatcgtcaatgataagcttgacatatgcgtggaagatgtacatgagattatcaggggggaacatttgagaagtttccgcaatgcagaatttatagagcatatgaaggcagaattgaaaggagaatagtgtatgttacacccatcttacacagatttaatgaaagtagtcaacaaggatgtagaggaaggcgagacaaaagtagtcaacagccgttattctatcgttatggctaccgcgaagcgggcaagggagatcattgacggttctatgccgcttgtccacgcgaaggacggcgagaagccgctttccgttgcgatcgacgaactgaactgcggcaagatcacagttgtcggtgaagaggaagaacagtaaggtatgataaaaatgaggcagatgcccgggaggtatctgcctttctgactataaataaggagatcgtatatatgaacatattgtttatttcccttggctgcgacaaaaatcttgtggactcggaagtgatgctgggacttctggacagggaaggatatcagatcgtggatgatgaggccgaggcggatatcattgtggtaaacacatgctgtttcatccacgatgcaaaagaagagagcatacagacgatccttgagatggcggagtacaagcagacggggagactcaaggcgctcatcgtcaccggctgtcttgcgcagcgctatcagaaggagatcgtggaggagataccggaggtggacgcggtgcttggcacctcctcctatgacaagatcgcggaggccgttaaggaagcgctggaaggccatccgtgcatggagatggaagacatagacgtactcccgctcgtggaatcaaaacgtctcgtcaccactggcggacattacgcgtatcttaagatagcggaaggctgtgacaagcattgtacgtactgtattataccgaagatacgggggaacttccggagcgttccgatggaacgtctcgttaaggaggcagaagcgctggcggagcagggagtgaaagaactgattctcgtggcgcaggagacgacgctgtacggaaaagacatttacggggagaagtctcttcaccggctgctcagaaagctctgcggcatagaggggctgcgctggatccggatcctgtactgctatccggaggaaatctacgatgaactcatacaggttataaaggaagaaaagaagatctgtcattatctcgatcttccgatccagcatgccaacgacgacatattgaaacgcatgggaaggcggacagacaagaagcagctcatcgagatcgtcggaaagctgaggaaggaaattcccgatattacattgcgcacgactctcatcacgggcttcccgggcgagacgatcaagcagcatgaagagctgatggaatttgtagatgagatggcgtttgagcgtctcggtgtgtttacttattcaccggaggaggataccccggcagcttctatgccggatcagattccggaagaaataaaatcagaccgccaggcagaacttatggaacttcagcaggacattgtattcgagcaggctgagagcatggtcgggcaaaaagtgctcgtcatgatagagggcagagtggccgatgagaatgcttatgtgggaagaacatacagagatgccccgggcgtggacgggcttatatttatcaatacggaagaagaactgatgtccggagactttgccatggcagaggtgaccggagcttcagaatatgatttgataggagagttgatatcatgaatttaccaaacaaactgaccgtgctcagaataataatggttccgttttttgtcctgtttatgctgacagaccttggagggtctgccaacaaatggatagcgcttgtgctgttctgtgtggccagtctcacagacatgctggacgggaagatagcaagagcgagaaaccttgtgaccaacttcgggaaatttatggacccgctggcggacaagctgctcgtatgctccgccatgatctgcctcataccgcttggaaaactggatgcgtggatcgttatcgtgatcatagcaagagaatttatcatcagcggcttccgccttgtcgcttcagacagcggaatcgttatcgcagcaagttattgggggaagttcaagaccgtttcccagatgtttatgatcatcctgctcatcgccgatctgggcggcatgtttgatgtgattgggactgtgctcatatgggtatccttaatattgaccgttgtgtcactgatcgattatgttgtaaagaataaggaagtattaacacagggaggcatgtaaacatgacagtagaactgatatcggtaggaacagagatcctgctcggcaatatcgtaaatacgaatgcggcgtaccttgcggaaaaatgcgcgctgctcgggctgtcctgctaccatcagagcgcggtgggagacaatgaggaaaggctggaagatgcgatcaaactcgcgctttcccgttcagacatcgtgatcttaagcggagggcttgggcccacgaaagacgatattacgaaagaagtaactgcgaaagtatttggccgtgagataaaggaggatgcccatacgaaagcgcgcatccaggagtatttccggcaggtacacagcggacagataacgccgaacaactggaaacaggctatggttccggaaggggctatcgtggtggacaatcataacgggaccgccccgggacttatcatagaggagaacgggaaggccgccatattgctgcccggtcccccgaatgagatcaaacctatgtttgagagggatatcgcttcctatctcaataaactgcagccggagggaatctactccaagatggtcaagatctgttcggtgggagagagtaaggcggagacgatggtggcagatctgatggacgcgcagacgaatcctacactggctccgtacgcaaagacgggagaggtgcactttcgggtgacggcgagggcaaagagcgaagaagaagcggaacagctcatgaaaccgatggtggacgaactgtataaacggttcggagataagatatatacgacggaagaagaggtgacgctggaggaggcgatcgtagagcttctaaaagaaaagaatcttcttgtgacgaccgcagagtcctgtaccggaggactgctggcgggccgtctgctgaatgtgccgggagcgtcttctgtatataaggaaggatacatcacctattcaaatgacgccaaagagcggatcctcggcgtgaaacgggagacgcttatggagtacggggcggtaagcccgcagacggcctatgagatggctgccggagcggcgaaggctgccggagcggacgcagctctcagtgtgaccggtatcgcaggaccgggaggcggcacgaaagagaagccggtcggccttgtctatatcggatgctgtgtaaagggaaatgtccgggtcgaggagttttactttacaggaagccgtgacaagaacagagattactctgtagtcagggcgctgacgctgttgagggaggaactgcttaaacaccattcataaggaggaaataagtatggatatcagaattctgaggcagcaggaacttctgccggcactgcatcttatatgggatgtgtttgcggaagatgtggcgccgtcgtatgctccggaaggtgtggaagaattccgggattttatcaagtacgataatataagtccaatgtgcggcaggggagaactgatcttcttcggcgcgtttgaagatgatgaacttaaggggagtatggctgtcaggcgggacggccatatctgcctgtttttcgtaaagaagacctgtcagggacagggcgtgggccacaggctgttcgaggccgcaaaagcgtactgtataaaagtgctcaaagtaaataagatggatgtcaatgcggcgcctgacgcggccgggcattacagcagccttggatttcagcagtccggggaagaacagaccgtaaatgggattcgtttccttccgatggaactgaagctggaagggacagggcggacgtctgccggtaagagtaaagtgcctctgatcgtggggatagcggccggaggcgtgctgctgctggccttggctgtattcggcatatacggcgccgccagagggatctacggatacgtacacgagcattacccggacagttatacggaaccctttgatgaccgggacagtcacgacggccgtgatcatgacgaccgcggttatgacggccatgacagcggagaacacagctgggattattatgacggaacttacggggacgatgaagatgagctctccgggcttgagtcgataccagtatatgaggcggacgatttatcctttgagacagaagaaaagctttataaatacgcggatgaagagaaaaagtccatggttatagatttccaggtcaaatatccccagatcaacggccttgatgagaaaacaggaaaaaaagtcaacgacgaactgaaaaactgcgccatggagacggtagataaaatatatacgaacccgtcggagagtgtgaaggagggggtcctcgcctccgaatatccggcgcttgtcagctatgtggactataagataagctatatgaacaatgatttcgtcagcgttgtgtttcaggattacagctaccagggggacagcagtacatattatgtgaatctgaggacgaggaatataagcctgaaagacggtacggtgtatgaagtaaaggatattataaatacgaatgaagcgtttatagacgactggctggacagaatgcggggggaagccggcgatgaggccatgctctcagaactgagccgcggtcagatggaggaggcgctgaagggagacagtctggacggagtgtatgtggcgaactttttcgccaatgcaaacggcatagagattggattcgatctcaactataaagaggacgatacaaacaaccttggatacgcctgggtgaccgctccgtttgatttcggcgatattagggaatataagacaaagagtgccttctggaaggcgattgattaggcaatttgttaattgacgaatgtcgaaaattatgagaaaataaacccagtatggtgttaaagatataacgatgcatatttgaaaggagttttaaaatgatttattcacatgaagtagaaatgatgtgtccagtggctcagggtgcaaatcacggaccagctccgattccggaagaagcaaaatgggtacaggcgaaagaagttaaggatatctccggtctgacacatggtgtgggctggtgtgcgcctcagcaggggacatgcaagctgactttgaatgtcaaagaaggtattatccaggaagcgcttgtggagacgatcggatgttcaggaatgacacattccgcagccatggcctcagagatccttccgggaaagacaattttagaagctttgaacacagaccttgtctgtgatgcaattaatacagctatgagagaactgttcctccagatcgtatacggaagaacacagagcgcattctcagaagacggacttccgatcggcgcaggcctggaagacctcggtaaaggacttcgttcccaggttggtaccatgtatggtacattggcaaaaggtccgcgttaccttgagatggcggaaggttatgtgacaggtatcgcgttggatgaccacgatgagatcatcggttaccagtttgtaagtcttggcaagttcactgacttcatcaaagccggcgatacgccaaacgacgcatgggaaaaggcaaaaggccagtacggacgcgtcgcggaagcagccaagatcatcgacccgcgtaaagaatagcaaaggtaacagagaattaatcaggaggacaagtaaatggctttatttgaatcatatgaaagaagaattgataaaatcaatgaagtattaaacagctatggcattgcttcgatcgaagaagcagaaaagatcacaaaagatgccgggcttgatgtatacaaccaggtgaagggaatccagccgatctgttttgagaatgcatgctgggcttatatcaccggcgccgctatcgcgatcaagaaaggctgtacgacggctgctgaggctgcagcggcgatcggagaagggcttcaggcattctgtattcccggttcggtagcagaccagcgtaaagtaggacttggacacggcaatttaggaaagatgcttctggaggaagatacagactgcttcgcattccttgcaggccatgaatcatttgcggcggcggaaggtgcgatcggtatcgcagagaaggcaaacaaggtccgtcagaaaccgcttcgcgttatcttaaacggccttggaaaagacgcggctaagatcatttccaggatcaacggatttacatatgtacagacagaatatgactacttcacaggtgaacttaaagaagtgcagagaatcgcatactctgacggactccgttcaaaggtaaactgctacggcgccaacgatgtgcgcgagggtgttgccatcatgcacaaagagggcgttgacgtatctatcacgggtaattcgacaaacccgacacgtttccagcatccggttgcaggtacatacaaaaaagaatgtatcgaacagggcaagaagtatttctccgttgcatccggcggcggtacaggacgtacgcttcatcctgacaacatggctgcgggcccggcttcttacggaatgacagatacattgggcagaatgcattctgacgcacagtttgcaggttcttcatctgtacctgctcacgtagagatgatgggacttatcggagcaggcaataacccgatggtcggcatgacagtagccgttgcggtgatgatcgaagaggcggctaaggctggcaaattctaagagaataagggaaaatataggcatttaaaggctgcactaactattctggttggtgcagtttttggtttttaaagtgtacaaaaatttgggtataggttataatatagaaaagcaattaaagggtgtgagactatggatgaaaataagtttaatgcaattattggtgaaattattttgggattgcgggatattgcaaaggctgaattagaagaagtagttttatatggttcctatgcaagaggcgactatgaccaggaatcagatattgatattgcagtgctgttaaagaatgatagaattggaatgaaaaagtatacagatgcgcttgctgatctcatggttgatttaaatttaaagtatgatatacttgtaagtttctgctgtattccatataaagaatatattgagaaaaagaatgtattaccttattacaggaatattgagcaagagggggtaaatcttattgcataataaaggacgggaggaactgtcaaattatagattgcagaaatctaaagagatgattgaagattcttataatgtctaaaaataaatattatcacagtaaaaactgcaccgatttttgatgatcggtgcagttttttggtttactcgcatgttagattcacctttctactcgactctatctttattgtccggccgtctgtctaaacggctgctattttttccatatatcattgttatatgtcttctgcataattcccatcagtttcatacagagaaagaattctgtctccccgccctgatgcttatgtttggcggttgcggcgacaagctcgtcgatgacctgctcggtgcgtatcagcatccggccttccagcagacaggtgatcgggtcaacgttcagcctcacctcggaaaaacggtaatatggatttgccgccatgtagagaaaggtgtcatagcttaaccggcattttgtgagttccagaggcacttccccgggctgtacctgataatagtggtacgctccaagcaccatgagcagccctttgtgaacgggatattttctggtgttgactattatagttccacggccgtccctgatatagagcagtgttatgccgctgttgtttttcagcacacttgtatcggtgaccgttttatttaccgctgtgatcggaaactgaaattccttttttgagtaataaggagagcttgcaaacagcggcaggtagttgatgttattttttttccccattttatttttcccctccacggtgcgcttcccggtattcgctgggcgccatttcgtatatttttttaaatgttctggtaaaggaacggctgcagttaaagccgacgttgaccgcgatgtccacgatgggcaggtctgtcgtcagaaggagagcttccgcatgcctgatgcgggtgaggacggcgagatccttataatgagaacggaaggtctcatagaccagatcccttatcacactttcggatatgtataatcttttggaagcctcttttatatccaccggttctgagaaacttgagtaagtgtgattgagcacttccatgagtgtcgtgctcatgatcatgccgcggtagacgccgctgccgtcattcagaagctgatttctatactctataggtgttgtacccatatattttttgaaaatacggtagaaagcaacctcagaagtgaagcccgaatgcgccgccacataagaaagcgacataccgtcgtacagcagcgcgacggaggcaatgttcactcttacacggttgagaaactgggaaaagctgtatccgctgatcaggcgcagttcccggttcagcaccgccgcagccgagccaaaatgagcagccacgctctgggaagtaaggtcttctgcaaaatgtgcgcttatgtacaggacggctttccagccgagcggacgttcgcagttcgtctccgggcggtgctgctttatactgtggtggataaaaaagtttgcaaactggccgagtacagccacttttatgagagcgctgcccgggtcaaagcaagaatcttcttcctcaaattcatgaaataacgcttctatcttatccagtctggcgccgtccagactgatgacaggaggggcatctatgatcgcgtccactgtgtccggttccggttcgtgaaaggtcagaaaagaagacagcgggtagtcatatacgcacacgctcagcaaaaggggctgtacagaacctgccctgatggtaaaagtgtgatacgactgcagccagatgaaagaaccgcgtttcagggggaaagagacgccgtttatcgtaatggcgccgcttccgcctgtgacgaatacaaagatagattcattttccgatataggaggtgtaatgtcgctgatgcagtgcttctgaagacgcagatatttgtccctgcctgaaaaaaaagagtggactggcctgccgcagattgatttggatttaatagcttctttcatcggttttctccttttttaagtctattttacttacagatgtcggattattggagattatttatcaatttaatagtattatagcatgatttgtccgttgtttcgttagattttactggaaaatgtgaagctttaaggttgtaattcgtcacgatattatccaatgtcatagagtatgtaagtgttaaagttatatcaaaggagggcgaaatatggacttgatgggtgatttttttaacaagtttaatctgggcacatcggactttgttactcccggaaagcagcttcagtacatctcaaagcataaggcttacacaacagcggtcatctgcatagacaaagaccagaccgtatcggagatcacatggaagcagctgcatacctgctctaaccagcttgcctggatgctgggagaatatggaattaaagaacgcgctaccgtgatagtggcctatccgaattcgatcgaacatctcattgccgcttttgccatctggaaagccggagcctgttatatgcccatatcgagcaagacggcgggggcagagctggatgagatatcccgtatcataaatccggcgggggcctttgcggactttgctgttccggacacagagttctgtctgaattccggggagatgtacgaagtgatgaggcaatatccggaaaagacgcctcccgatgtgagatctgatccgaacatgatatctccgtcaggcggtacgagcggaaagttaaaattcatccggcagaacatgccgggcggcatgacagacagtatgctaaagggctggtttgagatgtcgggcatggactttgagcagagacagcttctggttgggccgctgtttcacggcgcgcctcattcctccgcgttcaacggactttttgctggcaatacgctcgtgattccgcgaaacctctgcccggacaacatctgcaggctcataaaggaatataagattgaattcatacagatggttcccacacttatgaatcggatcgtcaagctgcccggtatccggaaggaggatttcgcgtctgtgaaagctctgtttcatacgggtggatactgtgcgccttatctgaagcagaaatggatggagctgctggcgccggagaagatctacgagatgtattccatgacagaagtgatcggaatgacgtgtatacgcggggacgactggctcaaacatccgggcagcatcgggctcccggttggagaaggaaaagtctccatccgggatgaaagcggtaaggaacttgccccgtatgaactcggagatatatacatgtcttcccccggcgaatgctttctcacagaatatatcaatcatgagccgcttaaagtcaccgatggggaataccgcagtgtcggagacatcgggtatgtagacgaggaaggctatctttatttttccgaccgccgcagcgatatgctggtgatcggcggggaaaatgtgtttgccgcggaggtggaagcagcgctcgtccggcacagcaaagtggcagacgccgttgtcatcggtattccggacgaggagtggggaagacggctgcatgcagtggtagaggccaggcaggagataccggcggatgaactcagagcatttctcggacaatatttatctccgtataagatcccggccacatttgaatatgtcaaaacaatagaaagaggagacaacgggaaggcagaccggaagcggatattcgaggactgcctttcgcgggaaaaatgttcctgcaaaaaataaaaacggccgctcaataatttacataaaacaggaggttttaaacaatgggttacgaagcgctattttcaccattcaaggtcagggggctggagcttaaaaacagaattattctgcctggcatgaatacgaagatgacaaaaaacaaacatgatgtgggagacgatatgatcgcctatcatgtggcgagggcaaaagcagggtgcgcgctcaacatatttgagtgtgtcgccttatgtcccgcgcctcacgcctacatgtatatgggtctgtacaacgaccatcatgtaagacagctcaggcgcctgaccgacgcagtgcatgaagcgggcgggaaaatggggatccagctgtggcacggaggattcagtccgcagttgttctttgatgagacgaacacactggagacgccggatacactttctgccgggcgcatccatgagatcgtggaggaattcggccgcggtgcgcggctggcggtgcaggccggatttgacgcggtagagtttcacgcggcccacagctatctgccccacgagttcctgagcccgggtatgaacaggcgcacggatgaatatggcggaagctttgagaaccgctgcagattctgctttgaagtcatcagcgcggtccgcagcaatataccggaagacatgccgtttttcatgcgtgtcggctgtatcgatgaactgatggagcagaacatgacagaggaagagatcgtggagttcatcaacaggagcgcggaccttggcgtggacgtggcggatatttcccgcggaaatgcgatgagctttgcgacagtatatgaagttcctccgttcaatctgcctcatggctttaatattgagaatatctacaatattaaaaagcagatcaaaattccggtagtcggtgtcgggcgtatcaatacgggtgagatggccaatcaggtgatcgaggacggtaagtttgacctcgtagccatcgggcgggcacagctcgccgatcctgaatgggtgacaaaggtgcgggaaggccgggaggaacttatacgccactgcattggctgcgaccagggctgttatgacgcagtcatcgatccaaagatgaaacacatcacatgtacccgtaatccgatgctctgtctggagtataaaggacttccgaagactgccgcgcccgagaaagttatgatcgcaggcggcgggatggccgggctctttgcggcggaagtgctgaagaaaagaggacatgagccggtcatctttgaagcgtccgacaggcttgcaggccagtttacgcttgccggtgtgtcaccgatgaagcaggactgggcggcggctgcaaagtgggaggcagaagagatcggacggcttgggatcgagtttcatctgaatacgcccgtgacgccaaagctgatcgaacaatttgcccctgaccgtgtcatcatcgcaaccggatccgaatatacagctcccgctataccagggatagacggcccgaatgtgtatacccagtatgaggtgctaagaggagaagcctccccggccggtcatgtggcagttatcggatgcgggctggtaggcgcggaagttgcggagctgcttgcgtccaggggagcgcaggtcactgccctggagaaaaagggggtcgggacagggctgaatatgctcagaagaatgttcctgaaccccgaattcaagtattacaagatcgcaaagatgtcaggagcccttgtgacgagcctggaacccggcatggtaaattatgagatcactgacagaaagacaaaggaagtaagccggggaacactaaaatgtgacgcggcagtgatctgtaccggaatcacagcgcgtccgtgcggggaactgaaggaaacgtgtgaggcagccggcattccggtacaggtgataggagacgctctggccgccagagacgcaagaacagcttcccgggaaggatatgaggcgggtatggcgctgcagtgacagaagcaatgtaaaaaactgacaattgaacagaaaggaagaaaatcatgagtattgaagagagattagaagcattggaaaaagagatccagaagatgaaagatattgaagagataaaaaaattgaaaggccagtatttccggtgccttgacggcaagttctgggatgaactggagactacactctccccgaacattgtaacttcctactccaacggcaagcttgtgttccacggtccaaaggaagtcacagactattttaagaaggcgatgccgagggaagaaataagcatgcacatgggacacactccggagatcacgatcgacagtgagactacggcgacaggcagatggtatctggaggataaactgatctttacagaagaaagcaagtatgccggttcaggcgtgaacggcggcgcattttacacagataagtatgagaaggtggacggcaaatggtatattcttgagaccgggtatcttcgtgtttacgaggaacattttatgcgcgacccgaagatcaagatcacgatgaacatgcacaaaacaaaataataaaagaaaaaggagaaagataaatatggctggtttaaaagattttccaagtttcggagcccttgcaggcttgaagatcctcgacagcgggtcgaatatagccggacctctcgggggaggacttctttccgaatgcggcgcaactgtcatccactttgaggggccaaaaaagccggataatcagcgggggtggtacggctatccccagaaccaccggaatcagctttccatggtggccgacatcaaaacagaggaaggccgcgagatattcatgaagctcatcaagtgggcagatatatgggtggaatcctccaaaggcggacagtatgacaggctcgggctttccgatgaagagatctttaaggtgaatccgaagatcgccatcgtgcacgtgtcaggatacggacagacaggagacccaagttacgtcacacgcgcttcctacgacgcggtagggcaggctttcagcggatacatgtcactgaacggaacgacggaggcgctgaagacgaatccgtatttgagcgattttgtgtgcggactgactacatgctgggctatgctggcgtgttatgtgagcacggtcctgaccgggaagggagaatctgtggatattgcccagtatgaggcgcttgcccgtattatggacggacgtgtgatgcagtttgcgacagatggagtgaaagtgccgagaacgggcaacaaagacgggcaggcagcgctgttcagtttctatacctgtaaggacggcaggaccatattcatcggcatgacaggagcggaagtgtgtaagcggggattcccgatcatcggactgccgcagccgggctcaggagacccggattttccggaagggtttacaggatggctcattgattccccggtagggcggcgtatggaagcggctatggagaaatatgtctcggaacatacgatggaggaagtagaggctgtcatgcaggaaaaccagatcccatgccagagagtatacgagcttgaggactgcatcagcgacccgcactggattgcgagagagacgatcacagagtgggatgacccgatgctcgggcatgttaccggcctggggcttatcaataaattcaaaaataatccttctaaaatctggcggggtgccccgctgtttggtatggataacagagatatactcagagaccttggatatacagacgaagagatcgacggtctgtacgaaaaaggtatcacaaatgaatttgacagggagactacgataaagcgttaccgcctcaaggaagtgattcctcacatgaaagatgaataggagcgcgcctctgcggtactgcatactggtttttaagctaaaggagagagattatgaatactgcgatcagatcgaactataagaaaggttttgttccatttggcattgccgcccttcttgtcagcctcatcgggggatttacggctgtcctcggaccggcatttgtggcggatattggaattgattacagcaatacgacatggatttccctggctctggcaatgtctaccgcagcctgcgcgcctattttaggaaaactgggcgacattctcggacggcgcacgacgctgcttctgggaatcctcgtatttacggcgggaaacgcgttgaccgcggttgccacttcacttgcttttatgctggcggcccggttcatagtaggtatcggaacggccgccatatctccggtcgtcatggcctacattgtcacggaatatcctccggaggagacgggaaaaggatttgcggtctatatgcttatctcaagcggcgctgtagttatcggccctacgtgcggcggcctgatcatgaatgccgcaggctggcgggcaatgatgtgggtatgtgtggcgttgtgcgcggccgtattcctgatctgtatgtttacgattaaaaagacggccttccagaaaaagaaaatgacagattttgaccgtgcaggctctgtgctcgtacttattttcttcagcctgttcctgtgcatcccgtcatttggacagaacatcggctggagctccgtacagtttatcgctgttgcgtctgttgctgccgtgtctttgatctgtcttgtgtttgtggagcgaaaagcaggcagccctgtattcaacggacagtttatggcgcgtaaagcttttatcctgccggtcatcatacttttcctgacccaggggctcatgcaggcgaacatgacaaatgtgattgtatttgtacgttatacacagccggataatgtgatcatatccagctttgcgatctctatcatgtatatcggcatgtcactcggttctgtgatcataggtccgatggcagacaagagggaaccccggacagtgcttacgttttctctgcttctgacaggtgtcggctgtggtatcatgtacttctttaccgcagagtcctccgtcgccatttttgcggcggcgcttggaatcctcggcgtcggacttggcggaaacgcaacgatctttatgaaagtggcgttgtccggtctctccagtgaagtggccggttcgggaacaggaacgtacggattattccgtgatatatcggcgccctttggtgtcgcggtttttgttccgctgttcacgaacggtgtcacgagccgtatggcagaagcggtggcgggaggagcgagcgagggggctgccactttgctggcggcagtgtcgtccatcaaaacactgaccgtcatcgagcttggctgtatcgttgccggcattgccgcggtcaggatgctgccgagaatacatgagaacaattaaagaaaagaggtatgttttaatggacatgaaagattccaaattattttccccgctgaaagtcggatccctgacacttaagaaccgggtcggcatggctcccatgagtatggactatgaggcggaagacgggacagtgccaaaacggctggcggacatatttgtccgccgggccgaaggagggacgggatatgtagtcatagacgctgttacggttgaccataattaccagtacattggcaatacgacatgtcttgattcagatgatcttgtgccgcagtttaaagtgtttgccgacagggtcagcgccgcgggcagcacgctcattccacagatcattcatccgggcccggagtccatctgcggatttcgcaagataccgccccttggcccgtccgtgaatacgaatgccaactgtcatgttagccgctctgtaagcattgaagagatacatacgataatccggcagttcggcgcggcggcgcggcgtgtccaggaagcaggatgcggaggcatctccctgcactgtgctcatgcgtatatgctgccgggcgctttcctttctccgcttcgcaacaaacgtatggatgagtacggcggctgcctcgacaaccgggcgcgttttatcctggaagtgattgaagaagtgagaaaaaatgtcagcgcggattttcctgtatttctgcggatctccggagacgagagagcggagggaggcaattccctggaggatatgctttatctggcgcctaagtttgaagcggcaggggtggatctgctggaggtgtccggagggacccagtatgaagggcttgagtatattatcccgagtcagggcaagcgcatcggcatgaacatctatgaagcggctgaaataaagaaggtggtgggcataccggtctatgcggtcggtaagatcaacgatatcaggtatgcggccgatattgtggagagagggatcgtggacggtgtggcagtcggcaggccgctgcttgcggacccggatctctgtaagaaggccaaagagaaccgctttgatgatatcaccccctgcggcagctgcgggggaagctgtattacgagaacagctcagagtccgcagtgccggtgccacatcaatcctcttgtaggacgggaatatgatttcccggctgtgcctgcacagagatctaagaaaacgctcgtgatcggcgcgggtcccggaggaatgtacgcagccgtcacggcggcggaacggggacatgatgtcacggtctgggaggcggaggatcaaatcgggggccagcttaacctggcggtcgtatcacccggcaaacaggagatgacaaaatggctcgttcatctgaatcacagagccaaaaaggccggagttacatttgaatttggaaaagaggcgaccgcggaggcagtcagggaatttgccccggaggctgtcattgtggcgaccggcgccaggccgctcgtgcctcccatcaaggggacgaaggaatatccggtgctaactgcccacgattttctgcgcggcaggtttgtcattccaaaaggacgcgtctgtgttcttggcggcggcgccgtggcatgtgagactgcggagacgatccttgcgaatgcacgtccgactgcgtttacgagaggctatgacgccagcatcggggatgtggaagtaacgctcgtggagatgctgccgcagctgctgaccggcgtgtgtgagcctaaccgtgcgcctatgctccgcagtctgaaaaagagcggtgttcacataaaggtgaatacaaagattcttgaagtcacggatcatgacgtaaaagtacagcaaggagacgggacggaagaatggctgagaggctttgactatattctctttggcctcggttccagaaattatgatccgctctcggaaacactgaaagagttcgttcccgaggtgcatgtcattggagacgccgtcagggcacgccaggcaagctttgccatgtgggaaggatttgaagctgcctacagtctgtagagatccggcagtacggcagtttgtatgaggagggttacatgtctgtaaaaataatatcaaaagacgagaaagaccgggaactgataatggagactgtccggaatgcacggaatcaggattatacgcctgagatgctgtgtgagctccagaaggtcatagagacaaaatattattactggtggcttatggatatgaaaggggaggagtatgccccagatctgttcggcagaaactttcactatttttgcaacggccatcttgtgaccgatgacggggcataccaggcgctgacatccaaatgggtcaactctgccatggtcacgatgcatatggggcatcagcccctcgtctggcttatggatgagaacaacgcccgcggcgtgttccagtatgaggaccaccatgtatataaagaagatgattcggtggtggagacatggatggtctactgtgatgattttgagaaggacagcggcggtacgtggcatatcactacaatgcgcatgtatcagaaacaggcggatggccggtaccgcgatccgtttcctccgaaagactgggtgccggaaggatggaaagagtcctaagggcggatgccttccacagtgatacatttgatgccaagtatactctttagaccgagggtgacggtatcatcataacttaatgcaggggtaagcacaaggatctctccggactcaccgggaatccttcggcttactctttttttgcctgtgagccgctttgcggctttcctgtcagcaaatcttgctgttatctccggcacgccggttcacgaactgggagcgtacgcctcgatcagaatggtattcagatttttcctgttcatatagtccttcagtttattctcgtatatcacgcgcatttcccaaccctccatgtgaatgtctgccggatgtttatattttaccatgaaacgtgaaggatatggtatacttaataaaaaatatgcataagggaggcagaagtttatggcaaggtataaatgcggtgtgtgcgggtacatatatgacgaagaaaaggaaggaaagccctttgaggagcttgagtcctgtccggcctgcagacagccgaaggaatcgttccaggcagcggacggggaagatggcgcagggcagaagtgcggttaccgttatatggaggtgatccggcagatggcagccacaggacggccggtcatcgaggcgatgggaacgcagatgccggtgccgggatttgatgagatacttgtactcggagcgcagctgaatccgccgccgctggacgccggtgaagacgtgaacatccggacggttatcgggaaacatgcgaagaagcctatggtgctggaagggcccatgtatgtctcacacatgtcctttggcgcactgtccagagaggcgaagacgtcgcttgcaagaggaagtgctcttgcgggaactgccatgtgcagcggagaaggaggaatcctgccggaagagaaagcagccgcttacaaatacatattcgagtatgttccgaaccgttacagcgtgacaccggagaacctgcgggaggcggacgctgtagagatcaagataggacaagggacaaaaccggggatggggggccatcttccgggcgataaggtgacagaggagatcgccagggtgagaaacaaaccgcttggaaaggacgtgatcagcccgtccaaatttgaggatataagcacaaaagaagagttaaaggagcttgtgtggcagcttcgggcgtcatcagggggacgcccgatcggtattaagatcgctgcgggaaggattgagaaagacttggaatactgcgtgtttgcacagccggacttcatcacgatcgacggccgcggcggagctacaggagcaagtccgaggatcatccgggattcgacgagtgtgccggcagtctatgcgctccatcgcgcaaagaaatatctggaggcgtcaggggcagatattgatctgatcatgacagggggctttcgtgtctccgctgacgctgtaaaagcgatcgctatgggagcatcggcggtggctgtcgcatcggcggcaatggtggcggcaggctgccagcagttccgggactgcggaagcggcaggtgtccggccgggatcgcgacccaggacgaaaagctgagagccagatttgatgccagagccgcctctgaacgggttgggaactactttaaagccgcctttgatgaaatacgcacatttgccaggatcacaggccataaggacatacacgatatgacagtagaagacctgtgcaccataagcagggatattgccgaatatacggatattccccatgcataacagacgtatgactgcggccatatgtcctgccggtgtgtgaaaaggctgtatcagaggtttgccaggatgagtataagtatgagagcgcacagacatacggttccggcagcggccaggatattgaggatcttatcgagtttatctttttgccgtataagcctgccggcgccggcatacaggccgatgccgatgattccgccaagcgtattgtcgatcaggtccgtaatgtcggtggctccaacggccagtatatactgcagtgtctcaagcagcagactgtaaccggcgatcagggcggtccttttcaaaaaagacagatcacttctgagcatggacagatagatgccgacaggcacgaatacgagtatgttctcaaatatttccgacagccgtacttttccgttgacgatcaatgaaccggcaaacgggatgaggtttatgctccggaagcggccgaattccgaaagggaaaactgcatcttaaacaggatgatccatgtcaccagaagaagatagatgacaaaaagcgcggcggtcagacggttatatttttggttttgtttcatgtgattaccctcctcagtttataagaacagtataaattagaaaaatgaagaaaagacaagttatttcttaagatattatttaaatggtgcaagatgtggtatgatatagacagttatatatatttaaggagggaatataaatgcagtatcgtctggacggcagtatcgtgccggttggagatgatgaggccattgaggacaacgaggcgcttgtggtgatcattacatcagaggagtacgagtcagagtataaaaagcagtttcagaaaaaaatgctgctcaatatctatcacacgcattactgcagggcagatctgctgaaggattgtgtcatcggaacatttgttatcccgagaaaggatgacctgctcgggaagtatatgacgttcggctactatatgacagcaaaaaagcttgtgctcgtggatgactcgggcatcattgagaagctggtaaagcatatggcggatacgctgacagtagaagagacatacacggcgcattttctctttgagctgatggagtatcttgtcaaagaggatgttatttttctccagaattatgaaaagaagctttcagagctggaaggagtgctgcttcagggagtcatcacggactttgaccggcagatgctgtcgataagaaaggagcttcttgcactgcagtcatattatcagcagctcatcgaggtgagtgagacgctggaagagaatcaaaatcacatgtttgacgatgaagactgccgtgtcttcgacctgtattccaaacgggcggaccgcctgttcgacaatgccagacggctgcaggaatattcccttcagcttcgggagatgtatgaatcccagatagatatccggcagaaccagatcatgaagtttcttacggtcgtcacaacgatctttcttccgctcacgctgatcgccggatggtacggaatgaattttgtcggtatgccggagcttaagagtccgtacgggtatacggtagttatcatagtaagtatcgcgatcattgtcgtggagatctggctgtttaagataaagaaatggtttgattagaaagggtattcagaatggttttatgtatcggggacagcctgacgctcggcgtcatgggatattcttatattccgttcttacgccgggaggaaagaattgtaaatctcggcgttaacggcgattcactctggggcggcacacggaggctgcgcagctgcctgaaaaaaagcaaatataaaagtgcagatacggtcgtcatctctcttggaacgaacgatatactgcttccttatctgtccggccgctctctcttctggaaagcgcagtgcagactgcggaatctgtaccgcagtttcagcagtgatatatgggagtttgccgaacgctatgagacaatagtcagagaactggcggatgaggaatataaggtggttctcatagggcttccgtacatacagctggcaggatatccgctcgggaaagtggaggcatataacgactgtatacggagtacggccaagagatacggcgcacagttcatagacatatattctatgcagagcaggcatgtgaaaaaggtccggacgtgcagctggggaagatataatttcggaaggctggcggacggcatgttcatgctgctgtttccgcacagaaaagatgtattgtcccggaaaagaggtctggcggtgacggtggacggcgtacattttaattccggctcagcgcggctgcttgcgggtgcggtggagcgggtgctcggttgagaggaggcattgtgttatgttctttgacagaacggaagtattcatgacaatggaactggcgcggtatgcaagggcgaaggaaattctggacgggaagggaataccgtacacggtcaagacaaaaagctcaggaggctacagcgccaattcgcacaggatgggaaatttcggagagaaatttgaacacagtatcacatattatatatacacgaagaaagagcatgcggagcgcgcaaaacattttatatatagtgggctgcacggatagaaaaaagtttccaatttggaaactttttttcttattgttgcgtcttaatccgttgataatgaggataataatactataatgggattataagaaggagggaagaaaaatggctgctgtgaatattggcaaaaatattatgaaatacaggcgggaaacaggaatcacccaggaacagctcgcagagcatatgggagtatcgaagtcatcggtgtccaaatgggagaccggcaacgcgtatccggacatctgccttcttccggaactggcaactttgtttaatatctctgtcgatactttgatgggatacgagccgcagcttacgaagaaaagaatcgcgaagctgtaccgggagctggcggaggcatttccgtcagagccggaggggacatatgaaaaatgtgaaaacatgatcaagaagtattattcctgttttccatttttatataagatggcgctgctgtatctgaatcatgcagtgctcatgaaagagccggatacggtgatggagcgtgcatggatgctctgcagaagaatagagcaggacagcgccgacgcgtcgctcatcaaagatacggtctcgctggaggtgacgatactgatcatgcgcaacaaaccgctcgaagcgctggagatactcggcgaggatgtaaggccgctgggccaggacgcagagatgaccggggtggcgtatgagcagctgggcgaccggaagaaggcaagggagatattccaggtctgcgcgtaccagcatctgctcttctttatgcaggattctgtaaatttgatgatgctcagcacagaagacagggaattctgcgacgagacgataaagaggcttacggtgatcataaagctgtacggactggaaaagcttcatttttatacggcgctgcaattctatatggcagcggcggaattgtatgccggaagaaacgaggaagggaaggcagttgagatgatcgaaaggtacaccgatgttgtggtaaagacaccgatgccgtggagtcttgcctccagagattcttactttacagacgtcgatgactggctgaagcggtttgatgcggataaaggcacgccgagaggttccaggctcatcaaagaatccctttcagcttcactgacgcagaatccggtgtttcagcatatgcgggaagaattcaggttccgcacatgtgtggaaaaacttaagaaattacaggaggaataaaatatgaatgcattcgatgtattaagggaatatctgccggtattgctgccgcttatcctcatagaattagggctggcgcttacggcgctcatacatgtgctccgccacagacattacaaattcggaaacagggcgctgtgggtgatcgtagtgctgttcgtgcagatcatcggtccggttgcatatttcgtattcgggcgggaggagtcatagatgaacacattggagatccacgcacttaaaaaacgctttggacaaaacgacgtgctgaaaggggtggagctttctgtgccgccccattccgtatatggactgatcggacaaaacggcgcgggaaagacgaccactatgcggatcgtactaggactgctcacgcaggatgcgggggaagtgtatgtgtgcggcgaaaaggtaaagtacggggagacaaagacaaaccgatatatcggttatctgccggatgtcccggagttttacgggtacatgtctccggaagaatatttgggactgtgcgggagaatcgccggtatggatcattccgtcatcaaagaaaaaagtgaagaattattgtgcctgtcgggactgaaagacagcagaaagaaaaggatcgcgggattctccagggggatgaagcagaggcttggcattgcccaggcacttctgaacgagcctaagcttctcatatgcgacgagcccacatccgcgctggaccctatgggacgcaaagagatacttgacatactggaacaggtaaaagagaagacgacggttattttttcgacccatatcctgtctgacgtagagcgtatctgcgattctgtcgcaatacttcacaacggaacgatcatacaggacggggatctggaggaactgaaaatgaggcatatggcagattctcttctgctggagctgcggcgtccggaggatatgaaggggctgcttggaaagcttcaaggtctgcaggccaaacagcacgataaggtgtcgctcgtcattcatgcaccggatatatacgagacacagtaccggctgatgaagattctgtcagagagccggacggcggtggaaaagctggagatccaggaaccgtcgctggaacatctttttatggaggcggtgagatgagaggatttgcagcatttacgagaaaagaatttacagagtatttacgttcctataaactgctcatcattgtgatggtatttcttctgcttggtttcatgaatccggtctccgcgaaatatctgccggagctgatggagaattttatgcccgcagggatgaagatggagatcccggaaccggtaattgcggatgcgtgggcacagttttttaaaaatgtaccgcagatagggcttgtcgtcatggtgatcatcacaagcggaacgatgtcgcaggagttgggcagagggacactgctgccggtgctgacaaaaggtcttaagcgcagagcggtctggctgtccaaattcacaggcgccgccgtactctggacggggagttatttcctttcatttgcggtgacgtatgtgtacagccttctgttctgggacaaagcgtcggtgccggagcttgggacggcggtgttctttgcatggctgttcggtcttctgctccaaagcgtagttctgcttggaagcacactgtccagaagctatgcgggaggtcttttgtctgcgggagcgctggtgcttgccgggatggtgatgtctctgttccacggagcaggcaggtacagcccgctccggctcgcgtcggacaatatgtcactgattgacggaacgctgaagacaggggactttctgcctgccgcggcagctgctggcctgctcacggcggcggccgtgctggccggaattatggtgtttgacaagaaacaactgtaaaaaagaacaggttttgtgatataataggctgacagcattgctggcagcctattataacgtttgaaagaagagaggaactatgtttggatatgttaatatttacgaacctgagttaaaggtcagggatttcagaaagtataagtcatactactgcggactctgccatacgctgaaagagcggtatgggtttctcgggcagatgacgcttacatatgatatgacatttgcggtagtgctgcttacgtctctttatgaggcggagacagaacatataacgtgcccgtgcaaggtgcatccggtaaagaagcaggatatgcttgtaaatgaatatacggcatacgcggcagacatgaatatggtgctcgcttattttcacatgaaggacgactgggtagatgagaagaagatcagcggatttgcggggacatatgcactccaccgcaaagtaaagaaaataataaagaaatatccgcggcagagcagggtgatctgcaggtcgctgaaggagctggctgcctgtgagagagagggcgtcacagatattgacattccggcgggatgtttcggcaggcttatgtcagaactgttcgtatacaggaaggaccactgggaggagcgcctcagaacgcttggattctttctgggcaaattcatatatattatggatgcctacgaagatttggagaaggatgtaaaagagggctgctacaaccctctgaaagagacggcagacaggccggatcatgaggacaggtgccggcagatcctccagatgatgatcgcggaatgctgcgccggatttgaacagctgccgtgtcttttagatgtagacattttgagaaatatattatatgatggagtttggaaccgctataaaaaggttcagcaacaaaagaaggaagcgaaggaataaagcattatgacaaagaatccatatgaagtgttgggggtatctccgaatgcatcagacgatgagataaagagcgcgtaccgggaactgacaagaaaataccatccggatgccaatgtaaataatcctttggccgatctggcggaagagaggttcaaagaagttcaggaagcttacgatacgatcatgaaagagcgggaacagggcggcggataccgttacggatacggcggcgcgtacggagggaccggcggcgggcagcaggcaggttacgacagcgcgcagcagaatgtggagatgcaggcggtgtataactttattaacagcaggcggttccgtgaggcgctgaacctactggacagaatgcccgacagaacgtcacagtggtattatgcaagtgcatatgccaacgcaggcatgggcaacaacgtgctggccagggaccatgcggcccaggcggtcaatatggaaccaaacaatgtgcagtaccgtcagcttttgagccagcttgaatggaacagccagaggtatcagaacaatccgtacggcggatacggcgccggcggacagacgtgcgggaccggaaatatgtgctgtgacctctgtatagccgaccagctctgtgaatgtatgggaggagatctttgcacatgcatataaaggcaaaatcaatggcagtgtgcgggctgatgctggccctgtctgtcgtctttatggtacttggcagtgtgatagagacgagcaccttgtttttactggcagctgcctctttttttacggggatcgtcattcgggagttcggccttggaatgggggccgcattctggattgcggcagtccttctcggattgctgctcgctccgaataaattctatgtcatcacttttgcggcgatgggattttatattgaagcagccgaatttatccaccgtaagcttggaacgattgcaaatcttaagaaccgcagcgcggtattctgggtgttaaagtatatcgtgtttaatattttgtatatacctgctgtatttggattccaggagctcttgttcggacgcagtatatccggcggattcctggctgttgttatcgtggcgggacaggcggggctgttcatatacgacagggcttatgaatatgcgcagaggcagatctggagccggatgcgcaagcatcttatgaattagaaattaaatgtaaaacgcaataaggatggcagagcagccaacgactgttccgccatccttattttaaggaagcagcaggtcgagagcgtaaagaattccacacaacgtgtctgtcccggaagaatgaccgacggcgctgaagttacggaggatctcatctgccggaggcagatgagggagagagcatacggcctggctgaactgattctggagggcgcagtgcagaaaggtccggctgatatcatttgtatcggacagacgcccttcaagttgtatggcgagagcgcgggcaaaaggatgtgcgtcctggccgcagagcgtaagagcagcaagtataccgcacaggaagtcgtcgccgctcggggtaagtccgatcccgagtccgatcagcccggccaagacaccggccgcttcggaatattctttttcccggaaaaggatacggcagcgggacatacgctttccggctgcagagagcatcagatcatttggagctgccgtccggggagcagaggaaaacaaaagacagaacccactgttgtccgagcctttgacggccatgcggacctgactgtaaagtgcggcggaagaagagccggaaggtatcgggacaagcccggaccgatagatgtgtacaggcctgtaagtgaagacggataactgtccgctggacgagatctccacagcttcacccgacagacgcacgggctggccggggcggatgacgggggaagccaggtcctcctgctcaagatttgtgaccagactgacgggagacagaggggaagcagcgctctgcagcgcgagaagctgtccttctgtctgtatatttatcgttttgttatatacagaatgaacgatgccggaggaacattgacacaggatattgtctgcatatgtggaggtatgtgttattacacgattcatagcgcacgggctccttgactgatagtggtggcggaggcattatgacagactccaatctaataatagattctatcaaataatagaataaattacaaaaaataaattaaatacgatttaattttatacatatcagacaaaaaaaggttattttttcccgttttcatgtcattgtttttccctatactatctaatagaatacagagtaagaaataaatggttaaccagagtatgataaaaaaaagacaattttacctttgacaaggaggaaagcaatgtatgatttagttgtaaaaaacgggaaacttgtaaccccggacaggatttacgaagctgatatcgcggtgaaagacggagtatactctgcctttcttgcaaaaggaacacagacagaggcgaaagaggtcattgatgcagagggaaactatgtattcccaggcattattgactgccacgcgcatctcaatgaaccgggatttgagtaccgcgaagacttcgagaccggctccagggccgctgctgtggcaggctgtacatgtctgatcgatatgcctttgaacaatgacccttctcttatgaacaaagaaatcttcgatttgaagatgggacggatcagcaagcattctgtagttgattttgctctgtggggaggcattgtaggagattatgacaacgagcccggctctgtaaaaaacaatatgaatgaccttgtggatctgcataagtgcggcgttgcggcgtttaaaggctttacatgcccaaacggcgacctctttcctacggtaaatatgggaaatgtaagaaaagcgctggagattctgaaaccatacaatgcactctgcggttttcactgtgaagagttcggccaggtgctggagcgcgaaagagaggcaaaggcgagagagggcagaagcagtgaggagaagatcagagattttctcgactctcacgatgtatggacagaatacgtagcaacgaaaaacgtgatcgatatggcgcgcgccacgggcggacgagtgcatatctgccatgtgagccatccgatggtcgctcaggtcgtaaaagacgctatccacgaaggactcccggtcacggcagagacatgtcctcattatctcggttttacggaggactttgtatttgaaaaaggcgcgccggcaaaatgcacgcctccgatgcgtaagcaggaggatatggagaagctttgggattatgtgctcgacggaacattatcctgtgttggaagcgatcattctccggccgcagacgaagaaaaagataatgcggcaaaagatatatggcatgcatggggaggcctgaacgctatccagtatttccttcctatgatgtttgacatgacagtgaacaagaaaggcttaagcccgacactcatcgcaaaagtgatggactacaatcctgcaaaggtgttcggactgtacggacagaagggggcgtttgaactcggctttgacggggatatcgtcatcgtggacccggataaggagtggaaatgtacacaggaggaacttcttacaaagggacacgtttcctgctttgacggactggaggggaaaggcgcgccggtatgtacgatcatccgcggcagagtagtcgctgaaggcggaagctataaagaggatgccgtcggttatggaaagtatgtgacaccggcagacgcgagataacaagagaaggaatgaaggagaaagattatgagtgatgttaagaatgaagtaaagaaagaatcaggctcactggcgccgattcaggaaaaagaccgtattatgggatggggatcttatcttatgctctggcttggcggatgtatctctatcggtacgctgacgatgggttccgcccagttggacaaagggcttaaccttatgcaggtgtttctggcagtgctgatcggctccaccattctcgtcatcggtatctgtgccaacgaccggttcagttacaagtcgggagcgccatatgcgatacagcttaaaagtgcctacggcacaaaagggaatatcgtacctgtaatgatccgtggactgcccgcgatcgtatggtatgggttccagacatggcttggaggttctgcgatcaaccagatatcgatcgccatcttcggatatgacaacgtagtattattcttcatcctgttccaggtactccagatcatactgtctgtgaaagggttccatgggatcaaatgggtcgagaacgtgggaggcgttgtcatcgtatgtgcaatgctctacatgctctatgtatgtgttacccagtactggggagttatcggcgataagctcatcagcagggaaggttcctgggggatgcctttcatcgccgctatcatagcatttttcggaaacagtacgaccgttatgctcaatgcgggagactactcacgtgagctgaaaggcggattctctgtagggaagcgcggggttgcgtactttatcgccatggttcctaccactgtacttctcggactgatcggtgcgatggcgtctacggcgacaggtatcgcaaatccgatcaatgcattctcccagatggttcaaaataaggtccttctcgtcgccacgcttggttttatcctgttcgcgcagatgacgacaaaccttgcgagcaacgtagttccgccggcctacgcatttatggacgcatttaaaataaagcacaggactgcggttatcctcgtaggtgtccttgccgtatgtacatgtccgtggatcctcacgaatgacagttcggcggcaggactggatatgttcgtcaagatctatacggccttcttcggaccgatatttgcggtgctgatcacggattactatattatgcaccgggggaagatcgagggagagaagcttgatgatctgtataatgataaaggaaatcacgccggtgtcaactgggcggcgatcattgcaaccgcagtaggggcagttatcggtctgatcaatgtagacatttccttcttcaccgccacaataccgacaggcctggtatactatttctgtatgaagaagatgccgtcctgcggtcgtttcaggaaaggaacttctcttgagaagtgataggaggttatacatatgtatgatattttagtgaaaaacggaaaaattgtgacggcagatgcagtcacagcaggaaatatagctgtcaaagacggcaggatcgcagcggtgctggctgaagggatcgagcctgaggcatccagggtgatcgacgcaaaaggaaactatgtgttccccggggctatcgatacacatgcgcatctgaatgacccgggctatgagtggcgggaagattacgagcacggcacggctgcggccgctgtgggcggatatacgacagttatcgatatgccgctgcagaacgaaccagccatgacgaacgcagacttatttgaccggaaagaagaaaaagtgagcagtaatgcatacgcggactattgtttctggggcggacttgtaccggataattttgaggacctgaaggggatgcacgacaaaggctgtgtggcgtttaagtcatttatcggtccggtctctccagattacagttccttaaattacgggcaggcatatgaagcaatgcagcgcatcaaagaattcggcggacgtgcgggattccactgtgaggactactccctgatcaaatggcaggaggcgaggatgaaaagagaaggccgtctcgactggcagggctttctcgactcccggcctgtcatcgcagagatggtggctactgttgatatgatagagcttgccaaggctacagggtgcaaggtacatatctgccatgtgagcagcccggatgtggcgcagaagatcaaagaagcacagcaggaaggctgcgatattacggctgagacgtgttcccactatctgagccttacggataaggatgtcattgagaacggaccgctgttcaagtgcgcgccgccgctgcgctcccaggaggaagtagacagactgtggaagtatgtggaggacggcacattcagcggtatcgcaagcgaccattcgccatgctcttatgacgagaagttcaaggagatccttggaaacaagatcgaaaatgtgtttgacgtgtggggcggcataagcgggatccagagcggcttccaggtggcgttcaacgaaggatgtgtaaagagagacatatgtccgtctgtactggctgattccatggcgagacggcctgcgaaagcatttgggatctatggaagaaaaggagatatcaagcccggatttgacgcggacctcgtgatcgtagatccggagagagaatgggagatcacaggtgagtctctcctgtatgtcaataaaatttccgcatttgcaggcatgaaaggaaaaggactgccggtatgtacgatgatccgcggaaatgtcgttgccgaagacggtaagatcacagcagaaaaaggcgtgggcgagttgatcagaagattaagctagtccgtcaaacatcgagaggagagagaagatgagtaatattgtagaaaatctggaactgaacccggaactcgtaacgaacgtggacccggaccttcagccgacaaaaaaacgtatcatgggatctttatcctatgccgcaagctttatgggaggatgtgtatccatcggtacattttccatgggggcaggactgatcggggtgctgacggtaggccaggcgattcttgccatgatcatcggatgccttgttatcgccatcgcgctcgttattatcgggaactgcgggcataagtatggcattccttatacggtgcagctcagaagcagctttggaacggcgggcgtcaagattcccggtctgttaagaggcgtgccggcgatcatctggtttggattccagagctgggtaggagcgggagcgatcaacagctgcttcaagatcttatttggttttgacaacctcccggtcgtctatgcactgttcacgattctgcaggtagctttggcgatcaaagggtttgaagggatcaaatggcttgagaatatatcctgtattttcatcatcgccatccttgcctatatgttatacgtagtgaagacacagtttgccactgagatcgacgatgtgttctccggaatcaagggaacgtggggcatgccgttctgggcagcgacgacgtccttcctggggatctattccactatgatcatcaacgcgtcagactactcacgcaacctgaaagaaaacgtgaagtccatgcgcaccggaagcatctacaccgtggcgatcctgccggtgacactgttcatgggccttatcggtctccttgtgacagcggcgacaggaaacagcgacccggtagttgtattctcgacaacgatgggcagtaaattcctcacagtggtgacgcttttgtttatcgcatttgcccaggtgacgacgaacgtgctgaacaacatcgtaccgccgtcctatgtactgatggaatccttccacatgaagtggtcacatgcgacgatagttgtaggtattctctccgcgtgctgtatgccgtggaaactggtcacggaccagtcggcggcggggctgagcctgtttacccagttctattccgcattcctcgggcctatcttcgcggttatggcggtagactattatattctccgtaagaagaagctggatatcaacaacatgtacgataaacagggagtgttcaaaggtgtcaactgggcagccatcatcgcgatcatcgcaggttctctctgttcactgctcatcgtggagctgtcctggtatgtaagcctcataccgacaggacttgtgtattacttcctgatgaagtcaatgaagagctcggcaccattccgtaaagggactatttttgagtagatttttggaggatcgtggcgtacggcggaggaaaggcggcagggggctgcgggacggtcggtgcgcttgcaatccgtaggtaaagaagacgcggtatagactgacaccgacagatgcgacgggaaatctggatgatttcccgtcttagctgtctcagaaactgcacttgtagtgcagtttctggtctgtctataccgcgtcttctttacgaacggatcggcaaagctccctccaacgccccgcagccccctgccgcctttcctccgcctgtcactgcacgaagctttaatttactcaatgtgtaaaataacggaggactcaatggatttattttatcccaatccactatgctgtccgccgccagctaatttaaacttactctcctaaattcttattaaggaactgtactgtctcctggagtagttgggcggtgaacgggtttgtttcttcccggtcgaagtcgtgggtgtttccggcggcgataaactgtctggcctggtagcggctgctcagttcgaggaattcttcgtatggcacatccgggtcattggtgctgtgggcgcagaagagcgggcagggcagtgcggcgcaggcgcgcagggtgtagtccagatagaagtatttctcccgtccttcatacaggagggcgcgccagcggcccgtctgtcttgcgtacacgtagatgctgtagtgtgtgtccagtcctcccgatggctggagcccggctccggcgttgtccaggcatgaggcgtccacggccggaagggaacagtagtaactgctcggcgtctggaaccagctgtcgcacaggaagccgtagccatagtaggagagtataccctccggcgcggcggggaggtcgccctgggcggcggccagaaggcagaggtacgcgccggcggaacgtccccagagaaagaaagggagtgcatggccgcaatacagttcagggtatttgacatagtgggagatggaagaggtgacatcatccaggatcgtattaagctttgccgccggtgcaagaggatagtcgaaggacacgatgatatatcctgcttctgtcagtgtcttctgatgaagcgccgggaggtcgtctctttccccgtacagcagcccgcccccgtggaagtagaggatacaggctttgggggtgacgctgctgtccgaacagacggtggcgtgtttcaggtaaagtgtactgtttatttcaatgatttttttctgctgcattgttctggcctccttttaatgcccgcgctgtgatacgaatatattcttgtctgatgcggataaaatattaccgtacggcgtttcaacgccggcctttgcttaaatattgatccgacaaagctattatagcatataacaagatgaaacagacatgtgaaaaaattgacaatagggtataaagttgataaaaaatctatctgcttttctcaataataataattgaaaaaacgtgctgttgttgtcataattatggtataaaaactggttgaccactagagtaaatttaagaggaaagaaagagaggaattaaaaatgagttatttaaacgatcaggtaggataccgcgaggaacttttgatgacacgttctgtgatcaagaaagagaattatgtacttctcgagccagacgggcttgttaagaacagcattccgggatatgagaactgtgacgtgacgatccttggctcaccggctatgggcgcatcctttgcggattatctcgtaacggcaagagagggcggaaagaacagcggaatcggcggagagggactggagacattcctgtatgtgatctcaggtgaagtcacggtcaaaaatgcggataaagaagaagtgctcacagagggcggatacatcttctcacctgagagcaacgtagtttcttttgagaataagagtaaggaagacgcaaaactgtttgtctacaaacgcagatatgagagagtagaaggctacagcgcgtatacggtagtcggcaatgccaacgatcttccgtggattgaatatgaaggaatggagaactgccatatcaaagattttctcccggcagcgggcgacttcggattcgatatgaatatgcacattctaaagttcaagctcggcgcgtctcacggctatatcgagactcatgtacaggagcacggaatgtatttccttcagggcaaaggtatgtaccgcgtggacgacgagtgggttccggtaaaagccggcgactatatgttcctggatgcgtactgcccgcaggcatgctatgcggtaggacgagaagaagacttcgcctacatttactctaaagactgcaacagagacgtagtgttataaagcggagaaaggcagagatcagatgggcagaaaagttgtgatgtctccaaacgcgggaaagaccggtccgtattcacatgctgtggatgccggcggctgcctgtttctgtccggacagacgccgatcgacccggcggccggacagcttgtgaaaggggacattaccgcccagacaagacagagtttctccaatctgtttcacgtgctggaagaagcgggcctgacgccggatgatgttcagaaagtcaacgtatatctgacggatatggatgattttgaggcgatgaacgcggtgtatgccgagcagttttcagagccttacccggcccgcagcacggttggagtcgctgctcttgtgggcggtgcaaagatagagatcgaaatgatcgcgaagaagagtcagaacatagaagagtgattcggaaagtaaagaggagcagaaaaaatgaaactatctcgggatgaattaaaaaacctgatgaaaaataagctgatcaaagccggcttaagtgaggaacatgccgatatgacggctgagatcctcacatggtcggatgagaggggataccattcccacggcgcggtccgcgtggagtattacagcgagaggatcgcaaaagggggcatcacggcggacccgaaatttgagtggaaagagacggggccgtgttctgccatttatgaaggagacaatggctgcggatatgtagcatccacctttgcgatggaaaagacaatagagatggcgaaaaagtcaggcatcgcggtgactggcatccgcaacatttcacacagcggttcgatcggatattatacagagatggccgctaagcaggacctggtggcgattgcattctgccagtctgatcctatggcggtgccgtttggggggaccgagccgtattacggcacgaacccgatttcttttgcggctccgactgcggatgaccggacggtcgtatttgatatggcgacgacagttcaggcgtggggcaagattctggataagcgttccagacatgaggcgataccggatacgtgggcggttgatgaaaaagggcagccggtgacagattcaagtcttgtcaacgcactgcttccgatcgcgggcgcaaaagggtacggacttatgatgatggtcgacgtctttgcaggcgtgctgctaggcgttccgttcggcaaacatgtaagctccatgtaccacgacctttccaagggaagagaccttggacagatgttcatcgtgatggatccgtccagatttgtcggtctggatgcatttaagaagtccatgtcccaggtgctggatgaactcggcgagatgcccgctgcggaaggatacgggaaagtatactatccgggcgagcgcgcggtcatgaggcggaataaagcatatgaaacaggcggcgtggagatcgtagatgagatctatgattatctggtcagtgatgatgtgcattacgacagatacgaccacaaaaacagatttgccgaataagggaaggagaacatatgttaaagacgattgtgaagaagggaagctatcacgattctgttgttctcatgcttttgacgaatcagatatcaacgatcaaaggtgtgaaaaaagtttcgatcatgatggcaacacctgccaataaagatatatacagacagagcggtctgaatacggaagaactggaaagcgcgtctgcgaacgatatggtcgtcgttgcggatgtagatgacgaaagccttctggatacgatcatgcaggaaacagaagagtttttcaaaaagcagtcaacgaaagaaagtgataaaaagggagccgaggctgtcaagtcatgggataaggcgcttgagaagcttccggaggcaaatcttgccgtcatctctattccgggtgcgtacgcagctctggaagctgaccgcgcactcgatgaaggcatgaatgtatttatgttcagcgataatgtgacgctggaagatgagatcaagctgaagaacaaagcacatgaaaaagggctggcagttatgggaccggactgcggcaccgggatcatccagggagtgccggttgcatttactaacaatgtaacaccgggctctatcgggatcatcggcgcgtcaggcacagggatccaggaactgacaacgatcattgaccgtctcggcgagggggtaaagaacgcgatcggtaccggcggccgcgatctgtccatagaagtaggcggaactacaatgatggatatgatagaggctatggagagcgacacgagcgtgaaagtgctcatcatcatatcaaagccgccggcaaaggaggtcagagaccgcatctccgaccgtctgagcaacttcaggaaaccggtgatcacgctgttcctcggtgaaaagccggagtatcacgaagagggcttctaccatgcgtatacacttgacgaagcggcgcggctggctgtcggccttgtcagaggcgaagaagtgaaagaggctgaggtgaaagcagatacggcagacttcttcaaaccggaagaaaagaagacgatcaaggcatactattccggcggaacgctggccggagaggcagcaatgctcatcaaggatgcgcttgacatgaaagttcctccccagaaggcggaaggctttatgctgaagaccggaggacatatcgtggtggacctgggagatgacgtgtatacccaggggaaaccgcatccgatgatcgacccggccaaacgtatcgagtgtatgcaggaagctattgacgatgcatctaccggtgtgatccttctggatatcatgcttggctacggttcccatgaggatatggcaggggcgctccttccatccatcatcgaactgagggataaggcaaaagcagagggaagaaaactgttctttgtcgcgaccgtatgcggcacgagaagagacttccaggattatgacggggcggtcagcaagctgaaagacgcaggcgttatcgtgtgcgagaacaataagctcgctgttcacacggcgatccgcgctatcggtatggactttgaagagccggtgaaagagatccgtccaaaaaaagtggcaaagatcgaaaagacagaggcgtctgataaactgatacaactcctttccgagaaaccgaagatcatcaacatcggtctgaagagctttgcggaagtcgcagagtcctttggctgcggcgtagtgcagtatgactggatgccgcctgccggaggagatgtaaggctcataaagatactgaatttcctgcgcagctatgaagggttagacattgatgaagcgaaccgctctgtgatcgccaagatcgtggggagccagccggtaattcaggacgtggtgcctgcaaaaacggtcatcaaagagctgaatgaaggaaaggtgatcctgcatgcggggcctccgatccaatatagggatatgccggatccggtacagggttcctgtgtgggagccgctctgtttgaagggtgggccgcgacagaagaagaggccagaaagatcctggaatccggggaagttacttttattccgtgccatcatgtgaaggcagtgggaccgatgggaggcatcacctccgcgaacatgcctgtctttgtagtgaagaatatgacggacggcaacgaagcgtactgcaccatgaacgaaggaatcggcaaagtgctcagattcggcgcttattcacaggaagtcgtggacagactgctgtggatgaaagaagtgctcggaccgacacttggaaaagcgatccgctccatagacggcggactgagcgtcaatccactcgtcgcgaaagccatcgccatgggggatgaattccatcagagaaacatcgcggcgtcactggcattcctgaaagaggtaagcccgatcataacgaagatggatatggatgaaaaggaccgctatgacgtgatcaagttcctggcagatacggaccagttcttcctcaatattatgatggcgacagggaaagctgtcatggacggggcgagactccttacggaaggaacggtcgtaactgccatgtgcagaaacggcgtagagttcggcatccgcatcagcggcatgggagacgaatggtttaccgctccggtaaatacacctcaggggctttactttaccgggtatgacggggaagatgcgtgcccggatatgggggacagtgcgatcacggagacgctcggagtgggcggcatggccatgatagctgccccggcggtcacacggttcgtgggtgcgggcggatatgaagacgccctgcgtacgagtacagagatgacagagatcacaatagaccggaacccgaattttattattccgaactggaatttccagggaacatgtcttggcatcgatgcaaggcttgtagtggaaaaggggatcacgccggtcatcaatacaggtatagcacataaaattgccggatatggacagataggagcaggcacagtacatccgccggttgaatgctttgaaaaagcggtcacagcgtatgccaagaagctgggattctcttttgaataagctgggaggacagccatatgaaaaagaaaagagttgttattgcactgggagggaatgctctcggcaaaaattatgaagagcagaaagaagcggtcgcaaagaccgcaaaggtgatcgtggatctggtgcagcaggatatggagctcatcatcacgcacggcaacggccctcaggtggggatgatacagaacgccatggaccagcttgcgtgcacgtctgaagattataaggagacgccgcttccgacctgtgtggccatgagccagggatacatcggcatcgacctgcagaatgcgatcaaatacgagctttacagccgggaaatggatgtgaaagtgtccaccattctgtcacaggtagaggtggataaggaagatgaagcgttcagaaatccatccaagccgatcggccgtttcctgacaaaagaagaagcggaaaagaatgaagcgaacggcattacgtgtatggaagacgcgggaaggggctaccggatcgtagttgcctccccgatgccaaaaagaatacgggaactccagacgataaagacacttgttgacgccggccacattgtcatcacgtgcggcggaggagggatcccggtagtgaacgacgcaggaaagctctccggtgtcagcgcggtgatcgacaaagataacgtgagcagtcttctcgcggcggagatgaacgctgattatctgatcatcctcactgccgtagaaaaggtggcggtcaatttcggcaaagagaaccaggaatggctcagcgacctgaccgtagacgaggcgagggagtatattgcccaggaccagtttgcgaagggctccatgcttccgaagatcgaagctgcgatccgttttgcagagtccggtgaagggcggcatacgctcataactctgcttgataaggcggcagaaggcatcgccggcaagacgggtacagtaatacataagtaattaggagatagaatatgaacgtaccaacaaatctgtttatgtggataatggcatgtctgccaatcatagttttactgctgctgatgatcaagttccagtggggggccacagaggccgccccggtgggactgctcattacgatcgtcaccggcatattgttttacaaagcggatatcaggctgctggcgagtgagagcgcaaaagggatctggagcgcgcttatcatccttctgatcgtatggaccgcgatcctgttgtatcaggtcgccgacgaggcgaaggccttccttgtcatccggaacggaatgcgcagactcctgcccaatgagctgctcgtcgtgctggctctcggcttgatcctggagagcttcctccaggggatcaccggattcggggtgccggtagcggtgggagcaccgcttctgatcggtatcggggtaacacctctgtatgcggtcatcatacctctgctgggccaggcgtggggaaatacgttcggtacactggctgcggcatgggatgcactcgtaatgtctaccggtctggagccggggagcccggattatctggccgcggctttctgggcgggcttgtttatctggctgtggaatgtcattacaggccttgtgctctgctggttttacggcaaaggcaaggctgtgaagaaagggcttccggcggtacttatattagctgttatccaggggggaggagaactgctgctcactcaggtgaacacgaccatttcctgtttccttccatcgtgcatcgcgctggtcgttctgttcctgatcggaagaatgaagatgtacagagaagagtggagcctttccgacagtccgatcatgaaccgcacctttacgtccgggacttctgacgaggctccggcagatatgtcccttttacaggcgtttgtgccgtatatactgctcacggcgctcacgatggtcgtattggtcgtcacaccggtgaacaaatttctgggccagtttaccctcggattttctttccccgagacttccacgggctatggatttgtgaaccaggcggaagcctgcttttcgccgcttgcgccgttcacacatgcaagcatgttcctgctcctttcttctcttgcggggatcgtgtactttaaaaagcatgggtggatcaaggcagggggaacaaaaagggtgtttgccagatccattgccatgacgatgccgtccggcatcgcagtgatcggcctcgtcatcatgtctaaaattatgggcggaaccggccagacgatggtgctggcagacggtatagccagaattctcggcaaggcgtatgtcatactggcgcccgtagtaggtatgatcggatcgtttatgacaggaagcaatatgtcatccaacattctgttcggcgatttccaggtgacgacagcaggcctgctccacctggataaggcggcgatcctcggtgcacagacagcgggaggcgccatcggaagcgccatcagtccgagcaagatcattctcggcacgacgacggcgggaatcctcggcagcgaagggcaggtattgaaaaagatcataccgatcacgctgacgacaacgcttttgatcggcgccatcgtatttgtgtcagtgatattgtagaagcaggagttgtggtgatatggaaaaaaagaatttttttaagacaaaagaaggcggacttacgcttgcgtttatcgtcatactgatagcgttcgcacttattctggcaggactgaaaatgaaaggtgacggcatgtgcggggccggctttgtgctcatggctgcggcaatgctgtattcaccgcttaaagtatatgtgtttgaccgcataaagaagagttagaggagatccgcccgtgaaggcgagaaagggtatttatatggttattgaggagattacaggcagaatcgcaagagatttggaacatttaaaacaatacacggcgaccccgggaaatggctgtacaagactgccgttttcaaaggaagccagacaggccgtggaatatttgaaagaattgatgcatgagatagaccttgaagtatcggaggacgctgcgggcaatgtgttcggcctgttaaagggagaagatccggatgctccgtgcgtgatgatggggtcacactatgattccgtgtcaaacggcggagattacgatgggatcgccggtgtgatctgcgccatagaagttgcacgtctgctcagagaaaaggggataaagccaaaacgcagctttgtagcggcgggctttaacgacgaagagggtatgaggttcgggaccgggtatttcggttcaggcgctatgctcggccaccgggatgtggaatatacgaagaagttctgtgacaaggacggaatctccatttatgaggcgatgaaggaatatggcctcgttccggagaatatcgaagaggcagcgtgggaagagggcaggatcggctctttcctggaagtacatattgaacagggaccggtgctggatgcggaaggcgttgagcttggacttgtagactgtatcgtcggaatacaaagatacatggtcacggtcaacgggcgtgcggatcatgccggtacgacaccgatggatatgcggatggatgctgtggacgccgcggcaaaagtgatctcaaagatcgcggactgggcaagagaaaaagcagacggtacggtagccacggtcggatatatcaatacggttccgggcggaatgaatatcgtggccgagaaggtggaattcacggtagacatccgttccagaaataatgacaacattaacgatatcgccgccaggatcaaaaaagcgcttgagagagaagtggcagaatatggcggaagctatgagatcgagaacaaactgaccatcactccggtggagctttccgctgaaatgctggacattatggaagcagaatgtaaggagctcggatacagctacaggagaatgctgagcggcgcaggacatgacgcgcttgagatcggccagaacctgccggcggtcatgctgttcctgccaagcaaagaaggaagaagccattgtccggttgaatttacaaaatacagtgactttgcaaagggaactgtcatcatgcagaagctggcggaaaagcttctcgacaaataatagaccggaccggggcgcagaaacttatgagcagccagaagttgaatccaatatataaaaaggaaaatctccgccagctgagaagatatctcaacatgacccagagagaatttatctgccggttcctttccgacggggagggaacgccgtccatgagcccggctacctattccaatcttgagtccaaaggcgggagacggctggatgaagtgatcctctcagccgccgccgctctgaatatggattccatgctgttttccatgaagccggaggaatttgtgcggaagatggatattgtccttgcggggaccgaagcggcggaacgtatgagcagaaatgccgccaaaaagggaaggatagatgaacttctcttcaggctcacgatgtattttgccgagaaactgatggacaaagagctgaaaaagggagaccagatagagtcggacagagtgctggcaaagaagatgaatgtcgggcgttcggcgatccgcgaggcgctcaaggtgctggacgttctcgggatgatcgatatccgtcccggacaggggacgtatataagcagcgcggaggcagacttctttataataccgctgtcgtggtcgcttttcttgaacggcagccaggtggaggatatactgacggtcagaaatcttctggaggtgaaggcggcggagctggccgccggcagtgcaaagagcgcggggatccggaagcttgaggagatctcagagctcatccgcagggcgtacgaagatcagaaccagaaagagtttctcgagtatgacatagaatttcatacgtgtatcgcagagtgctccggaagccgggtcatcttaagtatgatccagacgatcagtaatctcatgcggcacataagcggtaccgggatggcggacgaagcgcagctgaaggctatttatgaagagcaccggaacgtgtaccgttttatacttgcccatgacagcagcggtgctgccaaagccatgggggagcatctggagcagtctgtcacgaggtataattacagataatgagacaaaaaaggcacaggtatgacaatttacgttatacggctgtgtctttttgtgatatactgtaaatattctcagtcggccatactgtaaatgtccggctgttgtcacctgcttatggccggatatatgcggctgaaaacgggcagtatcaatgttagcggagaggttgaaaatgggatttagtgtggaagagctgctgcaggcagaggaattaaaagatgttaagttaataagcggtgaacgcggccttgacagagagatcaaaggagtgacgatcatcgaagctccggatatcgtcaaatttattgacggcggagaagttcttctgacaggactgtatgcgttccggtcatgtaccgtcgaagaatttaaagtgtatatcaacgagctgacgagaaagagtgtcagtgcgctcattctaaagcgcggcaggaaggtggagaacgctgacacgaagatccatcttctgctggaattttccgagacccacgggatacctatcctggaggtgccttttgaattttcattcagagatatcatgagtcttatcatggagcatctgttcaatgaagaagtgacaaggcttaaatattttaaaacgacatatgataattttgcggcgcttgccctgacaccggattccaagggaaaagggatcgaaaatattctggacgtgcttgccaagctgatccgcaatccggtcgccgtctttaaccagaacatgtcctgtctggcttctacggacggagccggcggggagcttaagatcaggaaggatgccgtaccgtttgaaccgggaacgtattccaattacacatatctgaagcagaacggggaagtgtcccagtgcgtcattcaggtgaagatgagtttcagagaaaagatatatctcgttgtaagtgaggtgaaccagccattcaatacgatggacagcatagcggcagagagcgccataacggctctcaggtttgaattttcaaggcagtatgcagtgacagagctggaaaagaagtttcaaaatgatattatgcacaatatactgaacgggaaagtgcactccatcggtgagctccagaaaaatacaggactgctcggtgtggagatcgacgggtgctaccgggtcattgtgtttgggatgaagaacgagagcagtgcgaagggggacttcaaagccagggtgaaggacacaaacgtgctgagcacagccatatttgcgcatatatcggatgcaaagatacataatgacctggacaagatcgtcgtgattcagaaggtgcaaaaggatcagacgcaggaggagtaccgcagagagatcaaggaagtggcggaacaggtacaggcagaggtgtctgcgtataacaagtatctgaaagtgaaggccggcgtcggaaggcttgtggaagggatcatcaatctcccggagagctttaaggaggcgaaagaggcgtttatgttcgtggatgtggcaggggaagtatcggaggacgggaattcccgggcgatgctgttctcggatctgggcatatttaagcttctctgccagctggacgactcgtccatgatgctcgaatatgtgccggagggcctgcagaagctctataattataagaaacctcagagggacgacctgatcataacgctgaagacttatctggacagaaaccagaatctgtccaagacggcccaggatctgtatgtacattataagacggcagcctacagaatagagaagatcacaaagataacgggcattgactttgacaatgcgaacgaagtgctggcagtgcgcatcggcctcgtagtctataagatgatagagaattacaataaggatttcatataaattccgggaagaatcgggaagagagagatagtttatccagactagataaattatctctctttttttatctttttgcaccgatgtaatatgttaaaaaattatctataatgtgcaatatagataaaaaacatttagtcagcaacagttatgtatgcttattgaactactgacagcgaagagtaagtgtgcacaatcaccaagtcagtaagcagtatggagggattttatggacattaacttggaaagagtcctttcccgtctggaagaactgtatcagtgcggagcgcaggatgacggaacttacacgagaatggcatattcacccggggatataaaaggacgggagacattcgcaggatattttcgtaagctaggacttgagccggtcatggacagcgccggtaatctgaagttccggctggagggagaggatccaaaactgccggccatcgtgaccggttcccatctggatacggttccggacggcggaaagtatgacggcgtgctcggatgtgtggcaggacttgagatctgcgagacacttctgaaaagcggcaggagactgaaacatccgctggaagtcgttgtgtttaccgacgaagagggatttcgttttggcagcggacttctcggaagcggcgccatgtgcggggaggagcttcatatcagtgaggccgacgaggacatgaatggacagacaaggggcgaagtgatgaaagcttacgggctccatgtggccgatgtccccaaagcaaagagagccagagattctatacattgctttctggagcttcacgtagagcagggcgcctctctgtataagagcagtacgcctgtgggcgtcgtatcttccatcgccggggtgagccgttatgagatcacagtcaaaggggaggccaaccacgcgggaagtacagtgatggcggaccgcagggacgcgcttgtggcagcggccgggttcatatccgcagtgccccggatcgtggaagagtacggcagcgcatatacggtagccaccgtcggcacgatgaaggtagtcccaaattctgtcaatgtcattccggggacttgtacttttaacctggaaataagggatcaggacaaagagatgatagagctcatcgaaaggaaactggaagagcagcttggacggatctgtaaagagatgggtgagacttacacatttgagcgtttctcttaccacgagccggcgcctatggcagagtgggtgaaagaaagcattgaaaagtcggtacaggaacttgatattccatatgccgtgataccaagcggcgcttttcatgattcccttatcatgacagccaggttcccgacgggaatgatatttgttcctagtgtagatggcatcagccattcaagatatgagtatacagaaaaagaagatatcaggcagggcttaagggtgcttttagaaacgatcctcaaggtagatgacatgaatgtcacatgttaaaaaaatacaagaaaaaagaaaggaaggtaaagttatggacaagaaaaaaattggtattattggcggaggtatttcaggaacatgtctcggatatcatctgagcctttatgataatgcggaggtggtcgtatttgaaaaagacaccatcggaggagcttccactgcaaaatcagcgggaacggtatgtctttttgacgattctttgagaaacagatactgggatgtcagactgtatggatttgagtcctatctcaagatggaggaggaagaaaagggctccgcaggttttgacaagaccggaacactcgtagtggctacagacgagaaggtggaggcaacgatcaagactggcatcgcgcttgccaaagccgccggctatacaggagaatatattaccgataaggacaggatcaaagagatccttcccgacatctcgacggagaatattctcggcgccggatatacgcaggacgacggatacttcgacggaacgatgatctccaatacatatgcaaagaaaatgcagaagaacggcggaacgatcaagaccggcgtaaaagttacagaagttaaggtggaaaacaacaagatcaaagggctcaggacaagcgacggagaagattatgaatttgactgtgtagtagactgtacagggccatggagcaagtttacaggtgagatggtaggaatggatgtcccgatctggcatacaaaggcagaagcattcttcttatgccctccgggaaagaaattaggctataccttccctgtattaaaatatcctgcgttctatgccctgagagcaggcgacaatatctttatctgcaaatcccatctgtctatggacctgaacaatcctatgcatgcaggacagtgggatcctgacaagcttccggctacgggcgggacagacgactatttcatcgatttcctgttagaccagctggagtgcagagtgcctgggatcgtggacagcggccttgtatcttcctggctgtcctaccgcgcagagccgaaagatttccttccgatcctcggagagactcctgtagagggatacgttctcgccacaggatacggcggaaacggtgtgatcgaggctccggcggccagcagagaccttgcaaagttcattatgcgcggtgagaagacaccattgctggaagactgggcatttgaacgtctgttgaaataaggatatataacagagaggagaagttatgaatatagcagttcttataaagcaggttcccgtttccaatgacgtttccgtggacccggagactcatgcgcttgtgcgtgccagctccgagggtatgatcaaccctgcggatctgaatgcgatcgaggcggccatggtcttaaaagaacagacggaagggaaagtcgtggtatttacgatgggccctccggatgcagagaaagcattgagagatgcgatggcgctcggctgtgatgagagctgtctcattacggacagatgccttgccggaggagatactgtcgccacggcaaaggtgcttgcaaaaagccttgagaaatatgggacgtttgatctgatcttaagcggcgcgctgtcggcagacggcgccaccggacaggtgggcgccatggtggcggaatacatgggaatccctcatgtgtcagagatacaggggcttacctacgacgaaagtacggccggcacgattctggcagtgaagaaattccagggaatggaactgaagatcaaggctgcgcttccggcgctgatgagtgtctgttttgggtgcaacgaaccgcgtctggcgacgctgcgctcgaagcgggcggctaaaagtaaacctctggaagtgtatacgaatgcagagcttggcatggcggcaggtgagaccggcctggaagggtcccctaccgttgtgatcgattcctttgaaccggagagtacgagaaaggctcagatgcttacaggtacaccggatgagctggcacgtaaactgaaagagttgatcgagatcgagaaaggaaaagaatagatggctaatggaatttgtgttttcgcagagaattataatggaaatatagagcctgtcgtggcagaactggtcagtgcggcacatttcattaaaaagacgaccggtgaaaagatccaggcggtcgtcgcggccagagactgtgaacagctcgcagcacagctggagcaatccggcgtagatgagatatatgcggtcaagacagaccgggactgtacatttcaggatgacgcgctaagccaggtgctggcagagatgatcaaaagaatagatccggccagcgtgctcgttccggcgactccaatgggacgctctgtcttttcgagagttgcggcccggcttggctgcggccttacggcggactgtacagagttacttgtagataaacgggaggacggaagcttctacatcaaacagaacaagccttccttcggagagaatgtatttgtcacgatcgtgacaaaagaaggctgctatccccagatgatgacggtgagacccggtgtgtacacgccttacgaggccgcgccggatgcggaggtcaaagtcgagtatttcgacgatatcgtccttccggaatctaaaatagagatcgtggaggcgcttccggcctccagcgacacggacagcattctcgctgcggaggttgtcgttgtgggcggccgcggcgcagagagtgaagagaactttgaattgctgaaacggtttgcaggcaagcttgaggcagcgatcggcggcacaaggccgctggccgataccggaatgataccgtttgaacatcagatcgggcagaccggctttaccatccgtccgcgcatctgtatctctctcggcgtatccggagcgatccagcacacggaaggcatcaaagacacgaagctgtttgtcgcggtcaatgaggatgggaatgcgccgatcttcaacgtgtctgattacggtataatcggagatatgaaagaagttctgcagcgctacctggagttatagttttttacaaattgacgaatccctccagaagatataacatagacgtaaacgagaccagagagagatatctgaacaggggatatctttttctggtttgtggtcctgaaaaagagtttgatgataaagaaagggtgtaaatgagatggatttattagaagtaatgcggaaacggcgcagtatcagaaattatacggatgaaccggtcagagaagaagaccttcagaagatcatacaggcgggtctgctgtcagaatcaggaaaggcaaagcggccgtggcagtttatcgttgtacgcaataaagaagtgctggaatacctgtcccggtgtagagaaggcggagtgaaaatgctgaaggaagcacagtgcgccatcgttgtgaccggtgacgccgaggcgcaggacgtatgggtagaagactgttccgttgccatggcaaacatgcatctgatggcgtcaagcctcggcgtaggaagctgctggatacagggaaggctgaggaaggcggacgagaagacgacagaagagtatgtgagagaaaagctgaaattcccggagaactacaaactggaggcgattttgtccctcggaatgccggctgtgaaaatgcccgcgtatgatctggaagaactggacatggataaagtccgcgttgttgagtgattggggatttttgttgggaatgtttattttttggcggtggacggcaggtctgtcgggtgtgcaggggtgtggaagcgcgctacggcaggcgggaaagcgtaacggaaaaaagagccggaagcagacaaccgagcctattcggaatgaaatcctgaagggatttcctccctcagaggctctcgggaatgttatttgtgataacattcccgtgtctgtttccggctctttcttccgcaacgttttcctcacctgcctccgaacgcgcttccacacccctgcacacccgacagacctgcctgctcatcgctcaggatgctaaacattccaagcaaaaggaagtcccccgggtcgtcccaatgggcagactcgcatccgggaaactaaggccatagtgtaaatccattacttcctagccagggaatcccacgcgttgaagaaatttgagctttgttagggaacaggcagaggaacggcgggagggggctgtggggcgttggagggagctttgtcaagcagttagggaagaagccgcggcagggacagaccagaaactgcactacaagtgcagtttctgagacagctgaaataggaaatcatccagatttcctattgaattctgtcggtgtcggttactgccgcagcttcttcccttactgcttgcaagcgcaccgaccgtcccacagccccctcccgccgttcctctgccgtacgcttacaatcccccccaaattcctccaacaaaatccccatttagggaaagtgcagaaggatgctgagtgtgccggcggcatatgatgtccttatgctgcctcccatctgttcggtcagtgtcttggcaatggacagcccgaggccggttgatctgcttgcggcctctaccgtataatatcggtcgagcagcctgccggcctgtaattcgttcagctttgaggcgtgattagaaaagacgattccgccggtttcgtctaacttgatcgttagatctccgtcactgtatttgacggcattgcctataatgttgccgaatatacgatacagcgcattcttgtcgagactgcgcatgacagcggattctggaagatggatatctggtgtgatgcggctgcctttgagcactgcatagtatgcagagatactttctgcaagaatactgttcagtgatacggcttctcttttctgctgaaacggagctgatgtggtgacggaataacagaagagttcttccgccagcctgttcagcacatcggcgcggtcctggataatgcagagacaacgccggacttcttcagacatctcttctcgttccagcagttccagatacccgcatatggcggtgagcggcgttctgatatcgtgggatatgtttgttatggcctcttttatatttctgtcaccctgctggaaacgctgccgttcctctctgagtttccgaagctgcacattgatggtttcggcaagcgcgctcatatacgggtcgcggcttgagaggtcgataagaatattcgtttcagtttccagccggtcagccagcgctttgcttatttccgctgcggacttctgcagtatgcgtattttgatgaaaagtaaaataacggtgatgatcaacatgccggtgagggcacataacaggattgccataaggactcctttacttgatgtctttccgccggaatactatgattccggctccggaggcagcgatagtgatgataacagaatatacgggcatctgccacaaatgcgcgccggacatagaggcatactgcaggctctggccggtgggaagaatgtccataagtgctttgtatactttgcgcgttgttccggatacgtaggcctgattcggctgtgcttcctgctctaccatattaccggactcatcgatgtacgtataaccttcgtacatttcaggtgaagaaaggcgtgagttcatgtaaattgcggcaaacaggaggatgaagatcgtcagcagcacagttacagcggcggccgccttattctggatcatcatactgaggaacgtgaagatagaagacagggcagttaccataacgagacttcccaaaaggacagccagtacgatccggagttcagatttaaaaaatccgagtaagggaaatccgacggctcccgctgccgcgatgaaagacagcgtcataaaaatacccgcggctatacatacaagcaggtttgcggcatatatccgtccgcgtgtatgaccgatcatcagtttattgcggatagtgccttcactgtattctgtgccgagaaacagacagcagaatacggcagatacgatcccgatcatgatcgtataagagaaaaatacagaatcgacaggaatcggatcaccgtatcttttggaatccatgtaatttccaaacatgataaatacgccgtatgcagccataaagatcatgccgccccagaatactttgttttttttcagccgtgtaaaattggcattaagcagtctattcatttccttcacctcccagcaggcttacataataactttccagtgtttcatcgtgctggctgacagatactgtccggcagttctctttggcaagcgccagcacgaaagcggtgatatcgacagtggaaaagatgtccgcgcatgaatctgacaggatctgatattccatatgcatacgctccgccacgcgtgtgagcgcagttatatcagtgacctcaaaccgtgtacattttctgcacgcggcatccagttcccgggcgctcatctctttaaccatacgtccccggtcaatgaagccgtaatgggtcgcaaggcgggacagttcatcgagcatgtggctcgatatgaggacggtgatctggtgttcacggttcagctttaaaatgagttcgcgcatctcaatgatgccctgtggatccagtccgttgaccggctcatccagtacgagaaagtccgggcttccggcaagcgctaccgcaatgccaagcctttgacgcatgccgagagaaaagttctttgccttttttctgccggtgccctccagaccgaccagttttaaaagcgccggaatatcgtcgaaggacggcagaccgagtgtacggtactgttcttgcagattatcttcggcggtcatgtctgaatagatagacggtgtctcgatgacagcgccgattcttcttcgtgatctgaagacccctttgtccgtgttgtctgtgccgtacagtctgtatcccccggcagtgcaatgctgcagcccgcatatgagccggatgagagttgtcttgcctgcgccgttttttcctataaaaccgtaaatggaacctttcgggacatgcatggtcaaatgatccagcgctttaaaatgtctgtaatgtttgcataatgaatctgttgttaaaacatagtccatgttgttggcctcctttttggtgatacggaaagcttaactcataaaggttaaggaagcggttaagagaagagtaaagatttggttaagattcagttttctttcattttaaaaccaattccccatacagattcgatgtaatctttccggccggcatcctggagtttttttctcatattgctcacgtggaccttaagggagctttcggtgcagtcgggcgtgtcttcactgatatgttccagtatcacggatttcgtgcacacttgtgaaggattctgcatgagcagtttcaatatggcatattcagttcttgtcatcctgaccggaagaccgtgtacatggacggtgtgagatgccgtatccaccgttatatcgtcaaatacaagactgtgcgccgcgcttgtaacggcggtacttctcagttgtacggcaattcttgccagcagttcctttgtgtcaaaaggtttagtgatataatcggcagcgccgccgagcagaagcgtgactttgtcgtccacacttgttttggcgctcatgattatcacggggattccctctaattccggcagtatttcctctccgcttaagccgggcagcatcaggtcaagtaaaataaggtcgggcttttcgcgggacagaagcagcagcgcctcggtgcctgaataggcgcggcctgtaaagtatccttctctggtgagaagttcatccagcatatttcctatatacatatcatcgtcgatgatcagaattttttttatggcggtctcctccaatctgtagtatcactttaataagaatactatacttgttttagcaggtcaaataaagtaaacttaagaaaggatgccgcgatatatttcataaagaggcacttgacaaaaatacaataaattgatatcattaaaaaacagaacgcactctgttttaatgataaaagaaaagaggtgcagtatgcagagagtatattcattactggtagataataatcctggcgtactgagccggatcgccggattgttcagcaggcgcggctacagtatcgacagcatcacagcgggcgtcaccgcggatccgagatttacaaggatcaccatagtggcaagcggggatgaactgatcctgtctcagatcgagaagcaggtgagaaagcttgaagacgtgatcgagataaaggtgctgaagccggaagattctgtttaccgtgagcttatcatggtaaagatacttgccaatcccgcacagcgggcggagatcgtgtcactggcggacattttcagggcgaagatagtggatgtggaaaaggagtccctcatggtagaactgaccgggacgcagtccaagctggaagcctttctaaatctgctggacggatacgagatactggaacttgccagaacgggcataaccggactctcacgcggtatcaaggacgttacgatcatagagtaggacaataatgaaagaagctaaaggaatcaccctttaacgataaaagcaatgaaaagcaggaggtatacatatgtcagcaaaaatttattatcaggaagactgtaatttatccttattggaaggaaagacgatcgccgttatcggttacggaagccagggacatgcacatgcccttaacttaaaagagtcaggctgcaacgttatcatcggtctttacgaaggaagcagatcatgggccaaggccgagtcacagggatttgaagtatttacggcggcagaggcagcaaagaaggcagatatcatcatgatccttatcaatgatgagaagcaggctgcaatgtacaaaaaagacatcgagccgaacctggaagaaggcaatatgcttatgtttgcacacggctttgccattcatttcgggcagatcgtagcgccgaagaatgtagacgtgacaatgatcgctccaaaaggaccgggacatacggtaagaagcgaataccaggcaggaaaaggagttccttgtctcgttgccgttgagcaggacgcatccggcaaggcgcttgacaaagcacttgcatatgcactcgggatcggcggagcaagagcgggagtgcttgagactacgttcagaacagagacagagacagacctcttcggagagcaggcagtgctgtgcggcggtgtatgcgcgcttatgcaggcaggcttcgagacactgtgcgaggccggatatgatgcgagaaacgcatactttgagtgtatccacgagatgaagctgatcgtagacttgatctatcagtcaggatttgaaggaatgagatactccatctccaacacggcagagtacggtgattacataacaggaccgaagatcatcacggaagatacaaagaaagccatgaagaaaatcttaagcgatatccaggacggaacattcgctaaagactggctgacagagaactcctgcggtgcgccacacttcagggcgatgagaaaactggctgcagaacatccgtcagagaagatcggcgcagagattcgtaagctttacagctggagcgatgaagataagctgatcaataattaatattttgaaaggggtcagaccctctgcatatgcaggggtctgacccctttcaaaattcactccattttctgaaaacttgattgaatcggatgtatttttcgatatagtatgttaaaatataactatcatataaatcatgaattttcaaatcaagacggaaaggagagtgggccatggatgttaagttacaggatctgcgttctgagagaaacccgaaggcaaggataaagatcatgcacggacacttcgcgagaagtcattctcacgtgaatacctacatagacatatctacagtcaaatgccggtgcaacaacgcgagggagacggcccgggtgctggcggaaccgtatctgtcatccacgcagatcgacacgatcgtctgtctggacggcatggagacagtcggggcgtttctggcggaactgctgatggagccgggaaatatatctgtcaacggcgggaaaaacatatccgtcgttgctccggagatgaaccagcttggccagatgatgttccgggacaacacgaagcggatgattggcggagcgcatgtgctgatcctggccggttctgtcaatacgggcaggacgatgatgcaggccatagacacggttgtctattacgggggaaatgtatgcggcgtgtgcgcggtgttcagcgccgcgtcaaaggttgccggaattgatatccatgcgatctttaccacaagagaaattccgggataccaggtgtatccgggacatgactgtccgctttgcagacagggagtcaaggtcgatgcgatagtgaacagctacggatattccggcctgtgatcttacagcggatatccgtttgacaagtcaatcataaaaaggaggagttagaccgatggattcaagatttacagaccttcgttctgccaggaacccaaaagcgcgtattaagatcatgaaaggacattttgccacgagcaattcccacttgaatacgtacatcgatatgtcgacagtcaagacgagacataacaattcaagggaagcggctaaggagctggcaaatgagtatctgaccaacacaatggtgaatacgatcgtatgtctcgatgagacggaggtgatcggtacgttcatggcagaacatcttgcggacagcagcaatctgtcgctgagcgcgggaaacaatatctcagttataacgccggagtttgacacattggggcagatcatgttccgcgacaacaagcagcgcatgatccagaatcagcaggtgatcatactggcggcttccgtcacgaccgggaagacgatccacagggcgatcgactccatattgtactatggcggcaccgtgtgcgggatatgttccatattcagcgcggtgagcaagatagcaggaatggagatcaagacgatattcacaagcaaggaccttccggattaccgggcgtatgacgcaggtgactgtccgctctgcagggaaggaaagcgggtagaggcgctggtgaacagctacggttactccaagctgtagcggccgcaggcgcggacagaagataacagaacgacaggcgccgccggatgagggccgcctgtcgttctgttggattttttatcatattaaatgaaagcagcaaaaaaacagccactgacgggatggctgttctttaaaatcttctattctaattaagcaatctcgtttacagcttttgtcaaacgggaaatctttcttgcgcaggtgtttttgtgatatacacccttgctgccggctttgttgatttctctgatcgcagtcttaagagcgtctgcagcaacagcagcatctttatttgcaacagcagtctcaactttctttacgcaagttttaactttagatttgattgacttatttctagcagcttttgtttcgtttactaaaattcttttctttgcagatttgatattagccaactcgtccacctccaatatcttcatatttctttttcgatttcatattcgttagatccggacacggacgttctaacggaacatactcatttattttattccaaggaatgcataatgtcaatacatatttctcaaaatattgtaaaaactagcacttaaatgacgactaaagcgagggtgtggaaatgattgagaagtatagcatcagaacagacctggcattggaacagaaagaacgtttcgagtcagacaatgttgaagtacaaggggttgtattagaagaaagttacgatgaggaacgtgagataaggatcaccacggtcaggatcgagacagagaaaggcgccaagacgatgggcaagcctgtcggaacttatattaccatggaggcgccaaacatggcggtgccggacgaaggatatcatgaagaggtgtcaaaagaactcatgaaatttcttcagagatttctggacaaagacaaaaaagattattctgtactcgtcgtaggtctcggcaaccgcatggtgacgccggacgcgctcggcccttatgtggctgataatcttaacattacaaggcatatcgtaaaagaatacggaaagtatgccatgggggaagaggaagtacatctggtcagttccattgtgccgggagtcatggcccagaccggtatggagaccgtggagatcatccgcggcgtggtgaaagagacagagccggatatcatcatcgctgtcgacgcgcttgccgccagaagctccaaacgtctcaaccgtacgatccagatcgcggatacggggatcaatccagggtccggggtcgggaatcaccggaacgcgatcacggaggagacagtcggcgttccggtcatagcgatcggtgtcccgactgtggtggacgcggccacgatcgtaaacgacacgatggagaatcttatcgccgcgctggagacatccgagacactccggggcgtgggcgtcgtgatgcagggctacaatgcggcggaaaagtatgagcttgtgaaggaactgatatcgcctcatttaaatggaatgtttgtgacgccaaaggatattgatgagacggtgaagcggataagctttaccatctcagaagcgctgaatatgctgtttgcatagacagccgcggcagccaggtgtttctgatgtgaaatcaaccgggtcatattgcgcaggacatgcacataatcacggtgccggcatcatatagtgttaaaacggcaattaaaatgtgatcagattaggtgtgtgattttatttgaaagtaagacatcggataaataaaatgattattgcagttcccgtatgcattctggcagtatatgccggaatgcatacgcatgtagacccggcgggcaaggtaaagtatgagctgagtgaaatgctgatggaagaagcgcagcagatctatcttccgggctttgcatatacgcaggggagcagaggaagttctttcagggactggctgacgacggcggctatgaatatgatgcctctcgggacttatgtggaaggaaagtcagacatacatacagatgtagaagataaggagacatatgaaatgatactggcccagcaggccaacgatgaaaatgcggtggatgaaaacggcagactcatacagaatgatgagaaagatgcacagaatgaggaggccgttcagacatcgggaacgaagatagatacttctatggaaaagttgaaaagctttgaatatctcgtcggcaatttctacgttattgacggcggaacgatgacttcggcagatgagctgaacgccgagaagctgatggcaaaagacatgaagatcgaccagaagtccgacggcccgaaagtcctcatctaccacacccattcgcaggaggcgttcgccgattccaaggacggggacacgagcacgacgatcatggggatgggagactatctgtccaaactgctgagtgacaagtacggcatacagacgatgcaccatgaaggcgtctatgatctcgtggacgggaaacttgacaggagcaaggcgtatcagctggcggaaccggagatacagaagatcctggaggataatccgagcatcgaggtcgtcattgacctgcaccgcgacggtgtggcggagggcactcatcttgtgacggaggtgaacggaaaaccggcggcacagatcatgttctttaacgggctgagcagaacaaaggccaacgggaacatagactacttaaagaatccatacatagaggataatcttgcattttcgcttcagatgcagatttccgccgcaaataaatatcccggattcacgagaagaatatacctgagaggctaccggtataatatgcacctgaagccgaagacgctgctcatagaagcgggggcgcagacgaacacggtagaagagatgagaaatgcgatggaagtccttgcagacacactagataatgtgctgacaaagtaaaatgtgtttgattaaccctatatttcgtgctaatataaccttacggcagcgatgctgcgtaaggttagccgcggacggtcttcttgtccgagggtatccgcttttttttgagagcatggaattttccgccgttttacaggcggaaattgatgaagatacaagagaaaggaactgaaggaatggcaaagaaaaatacatatgatgctgacagtatatctatattggaggggctggaggcagtacggaaaagaccaggtatgtatatcggaagtgtttccacaaagggcctgaaccacctgatctacgagatcgtagataacgcggtggatgagcatctggcagggtgctgtgatgagatacgcgtgacactggaaaaagacggatctgccaccgtatccgacaacgggcgcggtgtcccggtaggactccacgcaaaaggagtgtcggcagaacgtatcgtatataccacgcttcatgcaggaggcaagtttgacgactcatcgtacaaaacgagcggaggtctgcatggagtggggtcttctgtagtaaacgctctctctgcctatatggacgtgcaggtaagcagggaagggtatatccaccatgaccgctatgagcgcggcaaaccggtcatagaactcgaagacggtcttcttccgaagaccggaaagacaaaaaagaccggtacaaagatcaatttccttcccgatgacaccatatttgagaagaccagattccgggcggatgaagtcaagagcaggatgcacgagacagcctatctgaacccgacgcttacgatcatctttgaagatctgcgcggggagacgcccgagcgtatcgtataccatgagccggacgggatactcggcttcataaaagaactgaaccagaagaatgaagcggtccatgaaccggtatattttaagggagccgccgaggggatcgaagtggaggctgccttccagtatgtgaatgagtttcatgaaaatgtgctcggcttctgcaacaatatctataatgccgagggaggcacccatctgaccgggtttaagacgacattcacgacggtcatgaaccagtatgcgagagaactcggaatactgaaagagaaggacgccaactttacaggcgcggatatacgcaacggcatgacggccatcgtctccatcaagcacccggatccgagatttgaggggcagacaaagacgaagctggacaaccctgacgcagccaaggcggtcagcaaagtgacgaacgatgagatcacgagatattttgaccggaatctggacaacctgaagaaggtcatcgcgtgcgcggagaaagcggcaaaaataagaaagacagaggagaaggccaagaccaatctgctgactaagcagaagtattccttcgacagcaacggaaagcttgccaactgcgagagccgggatgcctccaggtgtgagatctttatcgtggagggagactctgccggcggctccgccaagacggcgcgtgaccggatgttccaggcgatcctccctatccgggggaaaatactcaacgtggagaaggccagtatcgacaaaatacttgccaatgcggagatcaaaacgatgatcaacgcattcggctgcggtttctcggaaggatacggcaacgactttgacatcagcggcctgcgctatgataagatcatcatcatggcggatgcggatgtggacggggctcatatctccacgctgcttttgaccttgttctaccggttcatgccggagcttatctatgagggacatgtatatgttgccatgccgcctctttataaggccataccgaaaaaaggggaagaggagtacctgtacgacgacaaggcgctggaacgctaccgcagaaaacacgacggtccgtttacgctgcagcggtacaaaggcctcggggaaatggatgcgcagcagctctgggagacgaccctgaatccagagacacggctgctgaaacggatagagatagaagatgccaggatggcgtccggcgttaccgagatgctgatggggacggaagttcctccgagaagaacatttatctacgaaaatgccactgaggcagaactggatatataaaagggagaagataaaatgcaggattcacagatcataagaaccgaatattcggatttgatgaaaaaatcatatattgattatgcgatgagtgttatcgtagcgagagccctgcctgacgtgcgcgacggactgaagccggtacagagaaggacgctctacgacatgcacgagcttggcatccgctacgacaggccgtaccggaaatgcgcccgtatagtcggggatacgatgggtaaataccacccccacggcgacagctctatctatgacgcgctcgtagtcatggcgcaggaatttaagaaaggaatgattcttgttgacggccacggcaacttcggatcgatcgaaggggacggcgcggcggctatgaggtatacggaggcccgccttgcaaagcttacgcaggacgcatatctgtccgatctggacaaggatattgtggattttgtccccaacttcgacgagacggagaaagagccggaagtgctgccggtgcgcgtgcccaatctgctcataaacggtgcggaaggaatcgctgtcggcatggcgacgagtataccgccccacaatctgggggaagtggtcgacgccgtgaaggcatatatgaaaaacgatgagatcagcacgaaacagctgatgagatatatgaagggacctgactttccgaccggggggatcgtcgtcaacaaggacgatctgccggatatctatgagagcggcgccggaaagatcaagatccggggcaaagtggagacggaagatatgaagggcggcaagaagcgcctcgtggtgacggagatcccgtatacgatgataggcgcggggatcggaaagttcctcaatgacgtgtgcgccctcgtggagtccaaaaagaccaatgacatcgtggacatctcaaatcagtcgtccaaagaaggcatacgtatcgtcattgagctgaaaaagggagccgatgccgaaaatcttacgaatatgctctataagaagacccgcctggaagacacgttcggcgtcaacatgctggcggtcgctgacggccggccggagacgatgggacttaagcagatcatcgagcatcacgtggatttccagtttgagcttgccacgcgcaagtataagaatcttctcgcaaaggagctggataagaaagagattcaggaaggtcttatcaaagcctgtgacgtcatcgaccttatcatagaaatactgcggggaagccagtcggtcaaagacgccaaggcctgcctcactaaaggcgtgacggagaatatcaagttcaagacctctatctcaaagaagatggccgcaatgctccggtttaccgagcgccaggcatccgccatcctggagatgcgtctgtataagctgatcgggctggagatagaggcgcttcagaaggagcacgaagagacgcttgagcatatcgcctcatatgaggatatcctgaataattatgattccatgtcagaagtcatcatggaagatctggacaggatcaaaaaagaatacgggcgcagccggcgcaccgcggtggaaaatgccgaggcagccgtatttgaagaaaataagatagaagaacaggaagtcgtattcctcatggaccgcttcggttacgccaagacagtggatacggcagtgtatgagcgcaataaagaggcggccgacgcggagaaccggtatgtactttcctgtatgaacacagggaagatatgtctgtttaccaacaccggtaagatgcatcagataaaagtgctggatcttccgtacgggaaattccgtgacaaaggccagccgatcgacaatgtgagcaactacaacagcacgcaggagacgatcgtttatctgtgcgatgcccagcagatgcagatcgccaggcttttgttcgtcacgaagacgggtatggtaaagaaggtggacggctcggaattccaggttgccaagcgtacgatagccgccacaaagcttcaggaggaagacgagctcataagcgtgcaggtgatcaatgacagccagaatatcgtgctgcagacagcggacggatatttcctgcggttcccggcaggagaggtgtcggagaagaagaagggagccatcggcgtaagggggatcaggcttcacaaaaatgacgaagtcgagcatgcgtatctctttgaggaaggcacggagacgaaagtagtgtacaaggaaaaagaagtgatgctcaaccgtctgaaatcaggtaagcgtgatacccagggagtgaaaaacagaggttagacggcgcaggggaacatgtctcctgtgctcccggccggccaaaaagtaaagtttttcccgtatttccttgcatttcaaggtgaacggtgttatactaagtaacagttacataaagaaaacggcagaagagtgaacgaaagttcactcttctttgttggtaggaaaggaagttagaaattgtcaaagagagaaatatacgaacagaagacggaagagatcctgctcccgatcgtagaggaatacggatttgagctggtggatgtcgagtatgtaaaggaaggcagtacgtggtatctgcgggcatatatcgacaagccgggcggcatcaatatagatgactgcgagaaggtaagccgtaggctgtccgatatactggatgagaaagattacattgatgacgcctatattatggaagtgagttccccggggcttggcaggccgcttaagaaagaaaaggattttaagagaagccttggagaagaagtcgagatcagaacctaccgcatgatggataaacagaaagagttcttcgggatactgaaggaatatgacgacagtacagttacaataatgcaggaagatgagacctttaaaacatttgccaaaagcgatatcgcgcttattcgcttagcgttcgatttttagattttaggaggagaatagtaatgaacacagagttattggaagcgttaaatattttggagaaggaaaaggatatcagtaaagagacgctgctggatgcaatagagaattcattgctgaatgcatgtaagaaccatttcggaaaggcagacaacataaaagtcatcatggacagagagacttgtgattacaaagtgttcgctgaaaagacggcagtggaagaggtggaagatgatctggagcagataagccttgaggatgcgagagagatcgacagcacgtttgagctcggggatatcgtacagataccgatagaatccaagtcgttcgggcggatcgccacacagaatgcaaagaacctcattctgcagaaaatccgggaagaagagagaaaagttgtctacgaccagtattttgagaaagaaaaagatatcgtgaccggtattgtccagcggtatgtaggtaaaaatatcagcattaacctcggtaaggccgacgccatgctcacagagaatgaacaggtcaaaggagaagtgtttaagccgacagaacgtatcaagctgtacgttgtggaagtaaagaatacgacgaaaggtccgaagatcctcgtatcccgtacacatcctgaacttgtgaagcgtctctttgagtcggaagtgacagaggtgaaagacggcaccgttgagatcaagagcattgcaagagaagccggaagcaggacgaagatcgcagtgtggtccaacgatccggacgtagatccggtcggcgcctgtgtcggcatgaacggggcgagagtgaatacgatcgtcaacgaactccgcggcgagaagatcgacattatcaactggagcgacaatccggctatactgattgaaaacgcactcagtccggcaaaagtcatctccgttatggctgatccggatgagaaagctgcgagtgtcatcgtacctgactatcagctttcactggcgatcggtaaagagggacagaacgccagactcgcggcaaggcttaccggatacaagatcgatatcaagagtgagacacaggcgatcgaatccggagaactgccggagaattatatggaactgagtgaaggcgtatatgaggaagagatgtatgaggatgactttgacggcgaatacacggaagagtatccggaggattatgatgacggcgccgccgaggacatagacgttacagatacagaggaatagggtgattgtttgagcagcagtaaaaaggtgcccatgcgtaaatgtgtgggctgtcaggaaatgaagagtaaaaaggaaatgattcgggttatccggacagaagaaggagactttcttctggacgccaccggcaagaaaaacggacgcggcgcttatgtgtgcccaacgagagcgtgccttgacaaggcggtcaaaaacaaaggcctggagcgttcttttaagcagtccattccgggtaaagtatacgagacgctggaaaaggagatggggtcgcttgagtcaaaataagatattatccctgatcggccttgccaccaaggccggaaagacggcgagcggcgagttctgtacggaaaaggaagtaaagtcgggaagagccgcgctcgtgatcgtggcaggggacgcatcagataacacgaagaagaaatttcagaacatgtgtgacttctatgaagtgccaatctatttttataaagataaagataccttggggcatgcaatgggaaaagagttccgggcttctcttgcggtacttgacgagggatttgcaaaaggaatcagaaagcatatggatacagaagataatacgattgcataaaggaggtagttagtatgtcaaaaattaaagtttatgaattagcaaaggaacttgatgtccacagtaaggatatcatcgagttcctcggcaaaaagaatatagaagtaaagagtcatatgagcacgctggaggacacagatgcggatatggtaaaaaagagcatgggcaaagcatcagtcccggataaagcagaagctggggacaaagaagcagccgcgcctaaaaagaaaaatatcgtgcacgtgttccgtccgcagaatacgcagaatgccggtaaacatggaaaccgccagggcgcgagacaagggcagcagggacagcagcctcagggcaagccgatgcaggtgaataacgggcgtcccgcaagacagacacagagcgcgcgtcccacgcaggggcaggacagaccacagaacgcccgcccggcacagagccaggacagaccgcagaacgcccgcccggtacaggggcaggacagaccgcagggcagccgcccggcgcagtctcaggacagaccacagaatacacgcccggcataccatcaggacagaccgcagggcgcacgccaggcgcagtctcaggacagaccgcagggcagccgtcccgcgcagtctcaggacagaccacagggggcgcgtccgtcatataaccaggacagaccgcagaacggccgccctgcacagggggcggacagaaacggaaaccgcggggaacgccagggaaaccgtccgcagaatggccgtcctcagggaacaaggccgcagaacggccgtccgtcctacaatcaggacagaccgcagggcagccgcacagggcgcccgcagggaggcgacagaccggcttatcagaatgacagaaatcagtcgagaagacctggggaaagatacgaccgtccaaacgataaaaagaatacgtccgttccttctccggcgctggaaggacagaagccgcagcgcagcaagggcaaaggaaaagacgattataagaagaaagattaccgccgtgacgaggacgacagaaacaaaggcaagaaacagaagacagatgtcaagaaagacatccagaaaccacagcagaaggctgtaaaggtagaggaagagatcaaggcgatcacgatcccggaggttctcacgatcaaagagctggcagacaagatgaagatcgtgccgtccgttattgtgaagaagcttttccttcagggcaagatcgttacggtaaaccaggagatcgattatgccacagcggaagagatcgcgctggagttcgatgtgctctgtgaaaaagaggaacagatagatgtgatcgaagagcttctgaaagaggaagacgaagacgagaagaagatgaagaagcgtcctccggtcgtgtgtgttatgggtcacgttgaccacggtaagacttctcttctggatgccatcaggcacacgaatgtgatagacagagaagcaggcgggatcacgcagcatataggggcatatgtcgttgaagtcaacggtgagcgcatcaccttcctcgatactccggggcatgaagctttcacagctatgcgtatgcgcggcgcaagctccacagatattgccatccttgttgttgcagctgacgacggtgtgatgccgcagacagttgaggcgatcaaccatgccaaggctgccggcatagagatcgttgtggcagtcaacaagatcgacaagccaagcgccaatatagacagagtaaaacaggagctggcagagtacgaactgatcccggaagactggggcggaagtacgatatttgttccggtatccgcgaagtccggagaaggacttgaagaactcatggagatgatcacgctcacggcagaagtcatggaacttaaggccaatgcaaacaggcgtgcgagaggtctcattatagaagcggagcttgataaaggaaaaggccctgtcgccacagtcctcgtacaaaaaggaacactgcgcgtaggagattccatcgcagccggctctgcttacggtaaagtgcgcgccatgatggacgacaagggcagacgcgtcaaagaagcaggtccgtccgtgccggtggagatcctcggactgaatgatgtgccgaacgccggagaggtatttgtaggatgcgcgaatgataaggaagcaagaagctttgcagagacatttatctcacagggcaaggtgaagctgcttgatgagacgaaggcaaaactgtcactggatgatctgttcacacagatcaaagaaggaaacttaaaggaacttggcatcgtggtaaaggcagatgtacaaggttcggtcgaggctctgaagcagagtcttctgaagctgtctaacgaagaggtagtcgttaagatcatacacggaggcgtcggagcgatcaatgaatctgatgtaagtcttgcatccgcgtcaaacgcgatcataataggatttaacgtacgcccggatgcgacggccaaggagacggcagagcgggaaggcgtggacctgagactttaccgcgtcatatacaatgcgatagaagatgtagaagcagcgatgaagggtcttctggatccggtgtttgaggagaaggtcctcggtcatgcggaagtccgccagacattcaaagcttccggtatcggcacgatcgccggttcatatgtgctggacggaacatttgagcgtgactgttccgtacggatcacaagagacgggatcgtcattttcgacgggcctcttgcatctctgaaacgtttcaaagatgatgtaaaagaagttagagcaggatatgagtgcggatttgtattccagaatttcaatgatatcaaggaaggtgaccttgtagaagccttcaagatggttgaaataccgagataacgcattcatgcggctctggaaaagggagtaaataatgaaaaaaagaagcattaaaaatacaagggtaaacacagaagtgcagcgggagctgagcagcattataaggggcggcatcaaggatccgagagtggcgccctggacctctgtggtcgcggctgaggttgctcctgacctcaagacgtgtaaggcatatataagcgtacttggcgacgaggaagcgcagaaggagacgataaaagggctgcagagcgcggaaggctatatccgcagagaactggcaagaaatctcaacatgcgcaatacacctgagataaagtttatccttgaccagtctatagaatatggagtcaacatgtcgaagaagattgaagaagtgacgaaaacaacagtaaaggatgaggcagatgctgaataagttattggctcaggcagattctatcgcgatcggcgggcatgtacggcctgacggagactgtgtgggttcctgtatgggactttaccagtacatccgtgaggtctggaaagaaaaagaggtggatgtatatctggaagatataccggatgtgcacaagtttattgaggcaacaaaggatatccggcatgagatcgtgcaggggaagacatatgatctttttatctgtctggactgcggagacgcagacagactgggattttctcttccgttgttccggtcggcccggaagacattctgtgtggaccaccatgtgagcaaccgggaatttgcagatgtgaattatatattcccggatgccagctctacttcagagctggtgtatgatctcactgataaggacaagatctcaacacggacggcggaggcgctttatctcggtatcgtgcatgatacgggagtctttcagtattcctgcgcctcaccgtccaccttcgaggcggcggcagagctgctgagaaaagggatcgacggtccgaagatcatagaggatacattttacgagaagacgtatgcacagaatcaggtactcggccgtgccctgctggagagcatccttctcctggagggacgatgcatcgcgtcttatctcacaaaaaagcagatggaattttacggtgttaccgccaaagatctggacggtatcgtgagccagttgagggttaccaaaggcgttgaggcggcgttgtttctgtatgagctggagccgaatgtctacaaagtcagcctccgttccggggatatggttgatgtgagccgtgttgcccagtatttcggaggaggcggacataaaaaggcggccgggttcagtatgacaggcacacaccgtgacgtgatgagcaatgtgataaagcagatcgcgctgcagctgcccgataccgaagaaaaggagtcatagaaaacatatgatacacggagtgatcaatgtgtataaagagaaaggttttacctctcacgatgttgtggccaagctgagaggaatcaccagacagaaaaagatcggacatacagggacgcttgatccggatgcggagggcgttcttcccgtgtgtatggggaaggcgacacggctttgcgatatgctcacagacaaagataaaacatatgaggcggtcctgctgctcgggacagagactgacacccaggatacatccggcgtcatcctggcggggaaggatacgtcacatctgacagaggagactgtgcgcagggctgtgctttcgttcacgggggaatacgagcagacgccgcccatgtattccgcggtgaaagtgaacggaagaaaactgtacgagttggcgagagaaggaaaagtcgttgaacgcagtgcaagaaaagtccggatacatgaaatacgcattcttgctgttgatctgccgagagtcaggatggagatccactgttctaaggggacatacatccgtacactctgccatgatatcgggcagagcctcggctgcggaggctgtatggagcagcttttccgtacgcgggccggacgttttgagattgcagaaagcctccgtctgtctgagatcgagaagaaaagggacgacggaacgcttatggaagccgtcgtgccggtcgatgagatgtttccggattacaggaagatcgttgccgacgagaaacaggagccacttgcgtacaacggtaatacatttccgcacagagtgtcccaggaaacgggcggaggcctggcggacggcgagaaagtcagggtctacgacagagaaggaaactttatcgcggtctatgaatacaggtccgcagaggataacttcagagtgaaaaagatgttttttgacagaaacagtaaatagaggataagttatgcaatatataaaaggtctggaagcatatgaggcggacggccgcagtgcagtgacgctcggaaagtttgacggcctgcatctggggcataagaagctgacagatatggtgaaggagtacggcaggcaggatgatataaaaagtattgtctgtgcctttgatatgagcgttttgtgggaaaagaagggaataagccgggaagtccttatgacaaaggacgagaggaaaaaccatctggaggaagaagtggactgtcttgtggactgcccctttacagaagaattcagccggatggaggcagaggaatttattgaaaatgtgatctgtaatatattccgggcagcttatgtagttgtaggaactgatttccgcttcggccatggaaagcgcggggacatacacatgctgcaggcatatgcccgtaaatatgactatgagctcattgtgatagagaaggagcgcagagaaggacatatcataagcagcacctatatcaaacagatactgaaggaaggaaatatgccctttgtctgtgaactgctcggatatccgtacgggcttcaaggggttgtggagcacgggaagaagcttggcagaaggctgggatttccgacgttcaacgtagcgcctgccagggagaaggtgatgcctcctaacggcgtgtatctgaacagggtacaggtcgacggagtgtggtatgacggtattgccaacatcggcgtgaagccgaccgtatcagatgaggagcggctgcttgtggaaagctacctgtttgactattccggggatgcatatggtaaagaggtacaaatagaactgcttgagttttgcaggccggagcagaagtttgcggatgtagaagagatgaagaaatgcgtggccggggatattgcctttggaagacagtattttgagatggcggcggattaggatagaggagaatacaaatgagtataacaacgtttttcttactgctcgggggactggggctgttcctgtttggaatgaagctcatgagcgaggggcttgagaaagcagcgggagccaagatgaggggaatcctggaattctttacaaagaacaggtttatcggaatgctggtaggaattctgttcacggctgtcgtacagtcgtcgagcgcgacgacggtcatggtagtaagctttgtgaattccggtcttatgaatctgctccaggcatcgggagtcatcctcggcgccaacatcggtacaacggtcaccggacagctgatcgcatttaacttatccgacattgcaccgctgtttgtcatcgtcggtgttatcatggtcatgttctgcaagaagctgaatataaaacgggcgggagaagtcatcctcggttttggaatattgtttatggggcttagcatcatgggggacgccatgtcttccctgcgggaatcccctcatatcgtggagcttctgaaatcgctgaagaacccgtttgcggccattttgaccggatttgtcatcacggccgtcctgcagagttcatccgccacggtaggtatcgtaatattgatggcctcccagggactgctggcttttgccatctgtccgttcctcattctcggatgcaacataggctcctgcgtgtccgcgctcatcgcgagccttggcggaaagaaagatgccaagcgcgccgccatgatccactttctgtttaacgtcatcggttcggcggtcatcctcattgtgctgctcgtcggcgtgacgccgatcacagatgcgctgttcagactgtcgggaggcaatgcggcccgtgcagtcgccaatacgcatacactgatcaaaatatttgaagtgattcttctgttcccgttcatgaactgggtagtcaaggctacttacaagatcgtaccgggaaaggatgcgacgtcagaggatggattcgagctgcagtttataggggaaggctccattgtatctccggcgactgctgttgttgacggaatccgcgagatcgaacatatggggaagatcgcgatcgccaatttaaagacagggatggacgcgctctgttcactgaatgaagaagagatcaatttggtgtacagcagagaaaagtatatagattttctgaacaagaagatcacggattatcttgtgcgggtcaacgagatcgaactgccgctggcagacgcaaagctcataggagggctgtttcacgtagtgaacgatatcgagcggatcggcgaccatgcggaaaattttgtggactctgcgaagatgcgtattgcggacagggtagagttcagcgacaaggctaaaaagcagctccatgatatgactgccatggtgacagagatattggagtattccctcgatatgttcacgaaccgcaaccaggagcatatgcaggagatactcgacctggaagatgagatcgacgacagggagaagaagctgcagcgttctcatgtgaaacgtctcacgaagaataaatgtacgccggaggcgggcatgatattttcagatacgatatcgggtctggagcgtgtggccgatcatgcgacgaatatcgcgttcgccatactggagccggaggacaacgaggaggacgatgaggaagaagagtaaagaatgtgagaaaatactgctttacttcaatggtcctctgtgatatactacatgagtgtaaacagccggcgttcggtaattggaagactccaaccattgcttaatgccaggcggtgcaatatagaataacaggaggaaaacgtaatggtttcaaaagagcagaaagaacagatcatcgctgaatatggcagaggtgaaggagatacaggttctccggaagtacagatcgccattctgacagcaaggatcaacgatcttacagatcactttaaggcaaatccgaaggatcaccactcaagaagaggtcttcttaagatggtaggacagagaagaggattacttgcttacttgaagaacaaggatattacaagataccgttctttaatcgagagacttggattaagaaaataatcgggtttccatcagaaattgtctataagggcattctccgcaaggaggatgcccttattttcgccttattcatgtgcgttttcaatgtatatcggcagagaatgattattctgtatattttgttaaataaataacaaaattctattgcaatttgtacaaatattaaatataataagctcagattgataataaattaaccaatagaggaggatgacatgttagaacaaagttattatgacaaggcagatgaagtgatcgcctcacatggctgcggccatgcgtcactcattccgattatccaggacattcagagcgaataccgttatctgcctcctgagcttttgagctatgtggcggggaaactcggtatcacggaggccaaagcctacagcgttgctacattctacgagaatttttccttcgagccaaaagggaaatatgtcattaaggtatgtgacggtacagcctgtcacgtcagaaaatcgatcccgatcctggaacggctttacagcgagctcggtctttcaaaagagaaagtgacaacggatgatatgctgtttacgcttgagacggtgtcctgtcttggagcctgcggccttgcgccggtgctgacggtgaacgacaaagtatatccggccatgacaccggatgccgcggcggaactgattcatgaactgagaggagcttagacatgcagaggatagaaaatatagaaaaactggagctggttcgggagaacgcaaaaaaagcgatagaacagagcagatgcagaattctcatctgcgcagggaccggatgcctggccggtggttcgggagaaatatatgaaaagatgagaaggcttacagaagagtgtcccgatgtagaagtggagtttgccccggaggcggcgcacggggagagcggcgtcggtgttaagaagagcggctgtcacggattctgcgagatgggtccgctgatgcggatcgaacccatgggaattctttacacaaaggtgtctgtggacgattgtgaagccatatttgagcggacgataaagaaaggcgatattatccggcatctgctgtataaacaggacggcatagagtaccagagacaggaggagataccgttttacaagaggcagacaaggctggtgctggaaaactgcgggcatatcgacgcagaacatattgaggaatacatagcacacggggggtataaggcgcttgggaaggtcctgtttgagatgaagcctgaggaagtcgtgcaggaggtgcttgactccaacttaagaggcagaggaggcggcggcttccagaccggatacaaatggagccaggtggccagacagcccgagacgacgagatacgttgtctgtaacggcgatgagggcgatccgggagcgttcatggacaggagcatcatggagggggatcctcacaagatgatcgagggaatgatgatcgccgcatatgcggtgggcgcgcaggaaggatacatctatgtccgcgcggagtatccgcttgccataagccgtctgaagctggcgatcaggcaggcgcaggagcggggactgctcggcgatgatatccttggatccgggttttccttccggctgcatatcaaccggggcgccggagcgtttgtctgcggtgagggaagcgcattgacagcctctattgaaggaaaccggggcatgccgagggtaaaaccgccccgcacggtggagcaggggctgtttgccaagccgacggtgcttaacaatgtagaaacgtttgccaatgtacctatgatcatcagccggggcgctgactggtacaagacgatcggtccggaaaacagcccgggtacgaaagcatttgcacttacgggaagcgtgaaaaatacaggacttatcgaggtcccgatgggcacgacgctgcgggaagtcatatacgacatcgggggagggatcaaaggagacggggaattcaaggcggtgcagataggcgggccttccggcggctgtctgatcacgcagcatctggatataagcctggactttgattcgctgaaaaagatgggcgccatgatcggatccggaggacttgtcgtcatggacgatcatacttgtatggtagaggtggctcgcttcttcatgaactttacccagaacgaaagctgcgggaagtgcgtgccgtgccgggagggtacaaagcggatgctggagatcctggaacggatcgtacagggcaacggcagggaagaagacctggatacgctggatgaacttgcaaggacgatcacggagactgcgctctgcggcctcgggaagagcgccgcgcttccggttatgagcacgcttaagctgttccgtgaggaatatatggaacatgtagtggagaaaaaatgtgtatctcacacatgtacggcgctgcgcaggtttgtcataagtccggaacgctgcagaggatgctccaagtgtgcgagaaactgtcctgcaggggcgatcagcggaaagatcaaagaaccgtatgtcattgacgacacaagatgtatcaagtgcggcgcctgcgagagcgcatgtgcattcggtgcgatccatatagaagcataggaggaaagagacatgaaatatatgacaatcaacaaccggaaggtggcgttcgaggatgagaagaatgtgctttcagtcatccggaagtccgggatcgatcttcctacgttctgctatcattcagagctgtcgacttacggagcgtgcaggatgtgcgtggtggaagatgacagggggagggtgtttgcgtcctgctcggagacaccgagggaaggcatggtcatctatacgaacacaccgagactccagcaccaccgcaaaatgatactggaactgctgctggcatcccactgcagagactgtacgacgtgccggaaaaatggagtctgtacactgcagaaactggcgcagcagctcggtgtaagttatgtcagatttgagaataacaagccgcagcttccgctggatgaaagttcggactgcatcgtgcgtgacccgaacaaatgtatactgtgcggggactgtgtgcgcacatgcgacgagatacaggggctcggtgtgctcgactttgccttccgcggcgcgaggatgcaggtgatgcctgcctttaataaggatctggcgaagacagattgtgtgggctgcggacagtgcagagccgtatgtccgaccggcgccatcacgatcaagcagaatatccgcccggtatgggaggcggttgcggatccggacacccgcgtcgtcgtgcagatcgcccccgcggtgcgtgtggcggtaggtgacaagttcggcatacctaagggagagaattctcttggaaagctggcggccgccctgcgccgcatgggatttgacgagatatatgacacgaatttcggcgcggacctcactgtcatggaagagtcaaaagaattgctggagcgcctggaatcaggggaaaacctgccgctgtttacctcctgctgtccgggatgggtcaagttttgtgagaacaaatatccggatcttcggaaacatatctctacatgccgctcgcctcagcagatgttcggcgcagtgctgaaggaagaggcgcgcatggacaaagaggataagagaaaaaccgtggttgtatccatcatgccgtgtacggcaaaaaaagccgagatacaccggccggagcacaggacggacggagagcaggatgtggactatgtgcttacgacgacggaagtgacgcggatgataaaagaggcgggaatcgaccttgcccagatgccgtcagaagcgcttgatatgcctttcggactttcttccggggcgggcgccatattcggggtgaccggaggggtgacggaagcagtcctgcgccgcctggcaggaagcagccggcaggaagagctggaaaatataagctttaccggagtgcgcggcatagacgggatcaaggaggcctctgtaaggctcggagagcgggaagtaaagatagccgtggtcaatgggctcaagtgcgcggatgaagtgatgagccgcatccggtccggtgagacttattatgatttcgtggaggtcatggcctgcaagcgcggctgcatcaccggcggcggacagccggtgccgataggggcgcgcacgaagaaggcgagactggaagcgctgtataagatcgatacggtggcgcagatcaaacggtccaacgaaaatcctattatccagacactttacagcgggctgttgagaggaaaagaacataagctgctccacaatgaaaaataaacacggaaagcttagggcagggagccggtatccggcagctctgccctactttttctgaaaacgtaaaaagagtggcataaatcctgcgagtgtgctataatattctagattgtggacaggaatgacatatccgagaccactgaaaagcgtattttatgctgaaagtatgtttttcagtagtttcggcgtctcctgtttacttaaaatgtaagagataaaaggagaacaatatgtataagaaatttgagatggaactggccggcagaaaactccgtgtagatgtagacagggttgccaagcaggccaacggagcggtgctcatgcactatggggatacgacggtactctgtacggcaacggcttctgagaagccgagagaaggaatcgacttcttcccgctaagcgttgagtacaatgagagattgtattctgtgggcaagatcccgggaggattcaacaaaagagaaggaaaagcttccgagaatgcggtgctcacatgccgtgtcatcgacagaccgatgcgcccgctgttcccgaaggattaccgcaatgacgttacactcgagaaccttgtcatgtcagtggaccaggactgcagccctgaactgacggccatgctcggcgcggcgatcgctactacgatttctgacatcccgtttgacggaccgatttccgccacacaggtagggcttgtggacaatacacttgtattcaatccgacggccgcacagaaagaagcttccgatatggcgcttacggtcgcttccacaagagataaggtgatcatgatcgaagccggggccaatgaagtcccggaagataagatgatagaagccatcttcgccgcacacgagctgaaccagaaagtgatagcttttatagacactatcgtggccgagtgcggaaaacagaagcatacgtatgaaagctgtgctgttccggaagagctgttcgctgcgatcagggaacttgttccgccgcaggagatggaagaggcagtatttacagatgacaagcagacacgtgaggaaaatatccgtgtcatcacagccaggctggaagaagcttttgcggagaaagaagaatggcttgaggtgctctcagaggcagtataccagtaccagaaaaagacagtgcgcaagatgatattaaaagaccacaagcgtccggacggcagggctgtcgaccagatcagagcgctggccgcagagatcgatctgataccgagggtacatggttccgccatgtttacaaggggacagacacagatatgtacggtcactacactggcaccgctggcagaagcgcagagactggacggacttgatgaggcggagacttccaagagatacatgcatcactataacttcccgtcttactccgtgggagagacgagaccgtcaagaggacccggacgccgtgagatcggccatggagctctggcagagagggctctcatacctgtactgccgtcggagacagagttcccatatgcgatccgtacggtatcagagacatttgaatccaatggatcaacttcccaggcaagtatctgtgcgtcctccatgtcacttatggcagcgggtgttccgatcaaggccgcggttgcaggtatctccgcaggacttgtgacaggcgacacggatgacgattatcttgtgctcaccgatattcagggactggaagactttttcggcgacatggacttcaaggttgcaggtacgcataaaggtatcactgcaattcagatggacattaagattcacggactgacaaggccgatcatcgaggaagccattgcgacgacgaagaaagcaagaacctttatccttgacgaagtgatgaacaagacgatcgcagagccgagaccggaagtgggagcgtatgcgccgaagatcatccagatgcagatcgatccgcagaagatcggtgatgtagtgggacagcgcggcaagacgatcaatgccatcatagagcagacaggcgttaagatcgatattaccgacgacggtgccgtttctatctgcggcgtagaggccgacagcatggcggaagcaaaaagactgatcgaaattatcgtggcggactttgaggcaggccagatactggaaggtaaagtagtcagcattaaagagtttggtgcattccttgaatttgctccgggcaaagaaggtatggttcatatttccaagatttcaaaagagaggatcaaccatgtagaagatgtactgacactgggagacgttgtcacggtagtatgccttggcaaggacaagatggggcgtatctctttcagcatgaaagatgttgcaaaataaattagggaagaaccacagaatgcaggaaactgattctgtggtttttgtctttatgaaacggtttctttcccgttccataacagttgagaaggaggacattatcaatgaaagtatatattatagggatgggcgcgctgggcgtcatgtatgcggatcacattaaagaacacggcggcgacgtggcgtttgtcatggaccgcgagaggctggaaagatatgagggacgtccggtcatctgcaacggcagggaacagacctttgccatgttggatgctgccgaggcggcccctgcggacctcgtgataacagcggtgaaatacagcggccttaaaccggccatacagacgatgagacactgtgtaggggcagataccattcttatgtccgtcatgaacgggatcagcagcgaagatatcattgcagagacatacgggagcgggagaatgatctatacggtagcccaggggatggatgccatgaaggcaggaaatgtgctcaagtacacacagatgggcgaactgtgcatcggcaggaaggagccggcccaaaagtctaatgtagagcgtgtggcggcatatttcgacagcatcggcatgccttatacggtggatgatgatatcatgcaccggatctggggcaagttcatgctgaatgtaggcgtgaaccagacttgcatggcatacggcactacatatgagggcgtgcttctgccgggagagccccatgatattatgctggaagccatgcatgaagtgatcgccgccgcgaacgcggagggaatcgcgctcggggaagaagacgtggatttctacgtcggccttttgggaaaacttgatccgaacggatatccgtctatggcccaggacagggttgcgcggcgttattcggaggtggagatgtttgcggggacagtgatccccatatgcgagaagcacaaaataccggctccggccaacagaaagctgtatgagatggtaaaagcgatagagaaagagtacggacagggataagggcggcgaagaaagtgttcgacgagctgggcgtgaagaagcaaactgaaaaatcgaaaagaggtgtttttatggcaaacgtcttgattgtggaagatgaaaagaacatgcaggatatcattgctgaatatatgcggcggggcggtcatacttgtttcaccgtcgatgatggcgtggacgctttaatgattttgaaaagcaatccaatggatttgatgatactggacgtgatgatgccccatctggacggcttttccgtctgtaagctggcgcgtgaaatgagcaatatgccgattatcatgctgacagccaaaggcggcgaggacgataagttaaagggctacgagtacggagccgacgactacatgacaaagcctttcagccccaaggtactgcttgcaaaagcaaacgccctgctccgccgttcttctcccgctcctttggacgcgttaaatgttgggaaaataatggtaataccatcgtctcataaggtgtttatagacgggcaggagatcacccttacccataaagaatatgaactgctgtatttcctcatggtaaatcccggacagatttttgcccgcgaccagctattgaacagaatctggggatatgacttcgagggtactacccggacggtagatacccatatcaagaccttgcggcagaaattgggcgacgaggggaaacatatcgtcacactcattcgctccggctataaattcgaggtggcagtatgaaattagatgataattttacgttccgtacagtccgaaaaaagatactgataatttcaaagctggccggtatcctgcttatcctttcctacatcctttcaaccaagttggaaatcgatcctgatgtttcatttgcggtttggtttgcctttgtgattgccgttgtccttgttgtcgattttctaatgggacactttatttcaaaacccatctctaaactcaatcaaacggccaggaagatggcaaaactggatttttccgacccttgcaccattacgaccaatgatgaatttggagaaatggccgtaagcctcaacactatggccgaaaatctgcaacaggcgcttaccggattggaagcagccaatacccggctcgaacaagacgtagagcaggagcggcggctgttggccgagcgtaaagagctggtcgataacctgtcccatgaaatgaaaaccccgctgggcgtgatccgcgcctatgccgagggtctgcaggacgaagcggacgaggccaaaaagcaaaagtattcagcaatcatcatagcggaaaccgagcggatgagcaatctaattacaaccctgttggatttgtcggcgctggaaacgggagcctgtcggcttgttcctgagcggtttgattttgtggaatttttagaaacagttgccgggagattgctgatcgacacgccggacgccaacttcactctgcaatatgaacttcccgataagagagcctatgtagatgtggacaaggcccgtatggagcaggttttagacaatctgctcgtcaacgcaaaaaagaatgtccagccgggtggtattttgaaactgtctctaaaagaacagatggggatgctgtatttctccgtctataaccaaggccccacgatcccgcaggaaaatctacctaagatctggacaaaattttaccgggatgtcaactctcaatacagcggttccgggctggggcttgccatcgtcgcgcagatactgtctatgcagaatttgagctatggagtggaaaatctttccgacggcgttcaattctatttctccattcccacagtcaaataaattgttttcatatgcggccctgctttcagaggatcatatctatacgagagcagggctttttctattgcaaaatttcacaccaacttcacagcggcctcacatcgacttcaccacatttttataaattttcctcaacaagagggttttgaccctggaaaaaaggaggctgttatatggaatttttaggtttgacttggtactggtggctggtgatcgtggtggtgctggtgatttcaattccgttcaaaatcaggtttatgaagtggtggagcaagcgccagcatcacaagaaaaaggatcggcacgggaaatggggtgacgatgaatgattgaagtaaaagatttgactttttcctacgggaaagataaacaggcccttcacggcttgaacttcaccgtagaagatggagaaatctttggctttctggggccgaatggctctggaaagtcaacgacccaaaaaattctgaccgggattttgaaaggtcatggcggtaaggtgtccctgtttggacaggatatttccgccgcgcacacgcaggagttttttcaaaagatcggcgttttgtttgagtttccctatctgtacgccaacttgagcgccattgataacctcaaatatttttcttctttctatcccaaagggcaactgcgggatattcaggaagttttggacgaattggagtttaagcctgattttttgaaaaagccggtttcctcctactcgaaaggtatgcggcaacgggcaagcatggcgcgggcgctgatcagcaatcccaagctcttgtttctggacgagccgaccagcgggcttgacccgtccggcgctgttctcttccgcaagattattgaagcggagcggaagaaaggcaccacagtatttctaacgacccacaatatgctggacgccgatttgctctgtgaccgcgtggcctttatctccaatggaagaattatggcgctggacacgcccaaaaatctgaaagaacagaacagcaaccaccgcgtcgtgattgattatctgtaccaggggaagcgggaggaaaaaacgattgaggccccggaattggaggcgggcatcccctatgcacatgacgagatcatcagcatacattcacaggaacctaccttggaggatatgtttatcaaatacacgggaagggggctgtcttgatgtggaaaagcctctgttctctattcataaaagattgccggatgatggtatctggaaaattttttcttatgtcggtgggcttcctggttctttacactttgtatgtgaactttggatacgttaaatttatggacgccgggctgtacaatgtgtatctgtatgacccggcaggaacacagacaacggtttcctcgctggttcagcgagtttcatcgaaagaagcacttgacacaattttactcgatgatacgaacggagttggcattgatgccagtaccggggagccacagcttgtattctatgagggaacggaaaatgctgaccaccaccgggtcgattacgcactttctctcctgcagccatcagggaatcacagcgccgaagtgataggctccaatacgccggaacaaaaggcaaggaaagagattacctgtgaactgctgttttttgaaattgctgctgttggatttttagggatcgccgctgtgctgttcaaggaaaaagggatgggggttatccgtgttcatgccattatgcccttgcggaaaaatctattcatcctgtccaagctggcaattttcctgctgtccgatctgctctttgcaatattgctcacaatgctgaatgtcggattatcggataccgtatctatattgcctgcagtgttacttcaaacggcgctcctgtccttgtttatggctttgaccggactgacatgtaccctgcttctaaaagatttccgacagtttacattggcctatctgctgattgctatttttgtctcaactcctgtatttttgtcggcaaatacgtcggtaaagctgtattggatcgggttccatccattctatcacatttatatgggactgaaaaatgcttactttggaacaccaacagccggcccgctttactatttgggttatgctggagcaatcgcggcgctattcgtcgcagtacaatttgtgttccagagagaaataggaaaggagggctgacaatgaaaggattgcgttatcaacttaaaaatgttctgaaagataagttttgcctgatgtcttttcttctgccgattatcgtcgctgtggcgttaacctttgtcggctcgattgacctttcttcactgggagaacttcattttggcgttttggaaaacaacttgtctgctcaaaccgtcacatggctggagcgatatggcccggtgacaacttattcaacgccggaagaactgatggatgcaatcaacgagccttctacaaatttaatcggtgtggagattgacggagacagtatcaagaccattctttccggcgacgagctggatgtatttcgtcaaaccgccgacacgctccccgctttatatgagcaacgcggcatggcccggcaggtgaaggttcaaattattgaacgccccaatatgatggcgggatttcaagatatgtttgctgccataacgctgatcgtcgctatgtttatgggctgtaccttcaatgccatgaacattgtttcagagaaggaggacggcgtagcgtttatcaacgaaattttacccatgacccacagccggtacatcatgcagaaacttatcattggtttcctctgtgggtgcttgtcctcgatcattacagcttgtatctgttttcaactttccctgcataatactgccctcatgctggtactaattgttctttccgcatttgtggccgctctcatcggcctgtacatcggcaggttttctgaggggcttatggtcagcgtggtctatcttaaaatcgttatgctgttgttcatggccgtcccaatccttagctttcttttggggagcggcaattcgcttctctccgcaatttgctaccttgtcccctcgcaggcaactttcgagggcattatgagcctttcgggcggaagttctgcaacaataacaaaagatattcttatacttacagctcattgtgcggcatggtttctactctacattgccctttctgtgcgccgcaggagaaacgcatagcagtataagccatctgcccagcggcaaaaggaggaaaggaaatgtttgataagaaaagtgattacgcgctgaacgccagccttagacccggtaatggcacaccggggcgaggtcgcggtaatctgtcggaaataaatttttcggcagaaggggttgtaaaaaatagtcaatacggtattgttatatatatggaatgaccgaaacggtcaaaccggtttggacagtgtgagggggtgagagggtgaatgaaaagttttacacgcttccggaggagaagcggcagaagatcatcaatgcggccatggaggtgttctctcagaatgaatacaaacgggcgtccacggatctgatcgcggcgaaggcgggagtttccaaaggtctgctgttttattactttcataacaagaaggaattgtacttgtttctgtatgactatgtgatagaagtgatgaaggaacaggtcgtggatgagaagttctatgagataacggatttttttgaactgctttcctactgtgcagggaagaaggttaaggtgttgagcagaaatccgtatataacagactttgccatgcgggcgttttattcagagaaggaagctgtttctgatgatctgaaacagataaacgtatcccagacagaggaattgtatgagatgtatttcagcagcattgacgcacataagttcagggaggatgcggacccctacatggtcatgaagatgctcatatggatggccgacgggtatatgcatgatcttcagatgtcggggaaaccagtagatgtatatgtgctgatggaagagttcgaccgatggatgactatgttcagaaagctcgtgtataaggaggaatatcagaatgggcgtgattgagatcgacaatataacaaaagactacgggaaagggcggggcgtatttgatgtcagcttttctgtggaaaagggagaggtccttggatttcttggcccaaacggagccggcaagacgacgacgatccggcagcttatgggatttatcaggccggaccggggcagtctgtccattcaggggatggactgttttaaagaggcggacagaatacagaagtcggtcggatatcttccgggagagattgccttcatagattccatgaacggtatggaattcataaaatttgtggctcagatgaaaaagatgaaagggctgggccgggcgcatgaattgatggaactgtttgaactgaacgcatcaggcaaattgaaaaagatgtccaagggaatgaagcagaaaataggcattgtctgtgcttttatggacacgggggcggatatcctgatcctcgatgagccgacaagcgggctggacccgctaatgcagaaccggtttgtggaactcattctggcagaaaagaagcagggcagaacgatactcatgtcgtcccatatgtttgaggaagtcgagcgtacgtgcgaccgcgcggcgatcatacgtgacggcaggctcgtggcggtggaagagatggagaagctgagagagggaagacagaagacggtggaagtgacctttcaggaggcttccatggcagaggaatttgctgccggtttcccgaaggcggcctatcaggcgggcgagagaaccgtgactttaagagttggcagaaatctggatttctttgtgaaaaaggcaggcgcatatacggtgacggatctaaacgtgcgcacacagagcctggaagagtttttcctgcatttttacggagagggggcggaaaaataatgaatataacgttattaaaaaaagaactgaaatccaactggcttctgcttgttatttttctcgcggtgctcagtatgtatggcagcatgatcaccatgatgttcgatccgaagatgggggacggcctgcgggcgatggcggacagtatgcccggtatgtttgcggcgttcggcatgacaaatgtggggacgacactactggattttgtatcgagctatctgtatggtatcctctatgtggcattcccgggcgtatttatcataattttgtcaaacaggctggcagccagatacgttgacaacggctccatggcatatctcctggcggcgccggtgaagaggtggaagatcatgctgacgcaggcgctcttccttctgctctgtcttgtcataatggtcggctttgcgaccggactcatacttgtattcagcgaagcgctgtttcccggagagatggatataaaagcctttctgagactgaacgccgggcttctcggactgctcgtgttcttcggcggggccggaatctgcgcgtcctgcttctgcaacgaatcgaaaaatgcatcggcggtaagcacgacagttgtcgtatattcgatccttctgcagatgatatcacgggtgggggataagttcgagcatctgaaatatgccactcctctgaccctgtttgacaccgacggtctcggcgcaggggaccatgaggcgtggataatgtgcgccgtcttatatgcggcagggatcattcttatgggcgtcggtatcgtgaggttcagcaaaagagaccttccgctttgaataaaagaagaggaacaaaaagaaaagccactccggctttccgcacgtaagtgcaggaagccggagcggcttttccctatctgaaagtaacatttatgacacatatttcacttttggtcccgaccctcatgttcggtccgaagacgccgacaccggaggtgacaatattatgcatattccctttctttaaatatccgtatggattttcccacagaagctttattgtaagattccctggaaacatctgcccgtcgtgcgtatggccgcacagatccagatcgactcccgcaccggcaagttcgtccagttcctttggctcatggtcaatgacaaggacaggctttctcatatccatatcttctgtcagttcctctgctgatctgcgcttgtcgatacctctgccgggccgttcttcatccgcccttccgtacaggtagaaggaatcttctatgagcacgccttcatctcttaacagcgtgatacccgaatcttccagaaactggtccatccgtgggtcactgaccttcttttcatcatggttgaaggtaaaaccggcgagaatcttttcctgaacatcgtgatttccgtaacaggcatatacaccgtaggtgcttttgatcttctgcagtgtagaggcgatctgctccggatctttcagcgcgtcaaagtcattgtcaaagaaatcgcctgctatgacgacgaggtccgggttctgggcatttatctttctcaccatctgttccatctcatggtttccggtgttgtatccgagatgtaagtccgcagtgaggacgactttcatggaagagactgctccggcatctttgtctatcgcaacatcataagatgtagtgcggatatgctttccgttaaagacgccgtaagcgctgacagacaatataactgcgatacacagcgtccctgctgtgacaaaggtcctgcgggaggagagcttattttggtctgcctttattacgtacttaaggaagaggcggataaggtccgcgaaagccaccgtcagcagtatgtaacaaacggttccgaaccagatgtttgtcagcgtcttgagccacctgacgggccagaaaaaggagatcagtatggaaagggcaaagaagctgtagacaacaaggaccacggcgcgtaccgggcgctttctgaaatggcgggtgcatgcacccatccaccggatgagccagcggaatacatatatgtttaaaagtatatagacaggtgcgagaaaaacagcgatcataatacgaaaacctctctttatctgtagtctgaacagcccgcggacggcagagcagagatcacgctgccgcctgaggcattaagattgtaacatatttggtaataaattaaaaggctgtacatatattgtgtaaagaggtggacaaagatgcaaagagacagaatattaaaggtgctgcccgtgaaagtacgccggctcatagaggaagaacagcttcagtacgactaccttcaggagatcagattgaggacaggcaaaccgcttcttatgatctaccgcggggatgaactcatcacagggccggggcggggcgggccctatatcgtcacaaaagaggatatccgggagatggtgggatatatcagcaattactcgctgtatgcatatgagcaggaaatgaagcaggggtttatcacgatcgaaggggggcacagagttggaatgaccggacaggcgatcatagaggacgggaaagtaaagaacataaaatatatatcttcggtgaaccttcggatcgcacatgaagtgcttggatgcgcggatgaaatattcccctatgtggccctcaaccggaagctgtgccatacattgatcatttcgccgcccagatgcggcaaaacgacacttttaagagacatgatacggcagatatcggacggcaacgcgtgggtgaaggggatgtctgtgggagtggtggatgaacgttccgagatcggaggctgttatatgggagtcgcccagaatcatcttggcatgcgcacagacgtactggactgctgtccgaaggcggaaggcatgataatgctcatccgttccatgagcccggaagtggtggcggtggatgaaataggggcggcagaagatgtacatgctgtcgagtacgccatgcactgcggatgtaaactgcttgccagtatccacggcgcttccatggaggaaatacgaaagaaaccgctgcttggcagacttgtgcaggaaaagagatttgaacggtatatcgtacttggcagccgcattcatccaggtcagatagagggcatatatgatgacagaggaacgcttctgtatgcggagcagccggcgggacaaggagtgtagacaattatgatgaagatagcaggcgctctgctccttacggcaggaacgacactgatggggatgagagcggcatcggggattcaggatgaatacaggcagatacaatatctgcagcagatcatgtacctgctgctaagtgaaatacggtacagcagggcatacctcggggaggcttttctccatatagggggacaggtcagggaaccatattcaaaatggctggcccagatgagccgccgcatggacagcagagacgaaggcatattctccgatatttgggagaacagcgcagaggagtatctggcagattccgggctccccggggaagagataagccggctgaaagctctgggcggaaggcttggggcggcagatatggatatgcagctcaagacattggagctgtatcaggagcagctggcggtctcgatgtcggaaaaaagagaagggatgaggacaaagatgaggttatgccgctgccttggcgttacgagcggcatatttctgacggtcctgcttgtatagaggaggcgtgtatgagtgttaatctgatatttaaaattgcagcggtcggtattctagtgtctgtgctgagccaggtgctcaagcacagcgggagggaagaacaggcgtttctcacgagtctggcaggactgcttctcgtattgttctggattgtaccgtatatttatgaattgttcgagtcgatcaaaaaattattttcactttagcttaaaagaggggttgccatatgagtatggttcagatagggattataggggtagtgggagcgctgcttgccgtacagtttaaaagcggaaaatcagaatatggtatttatatcagcgtagtgctcagtctgtttatctttttctgtatcatcacaaggctgaacatcatcgtggatatgatgcgcaccataggaagctatatcaatatggataccgcttatatcggaacattgatcaagatgctcggcatcacatatgtggcggagttctcctccgggatatgcaaagatgccggttaccagacgatcgcggtgcagatagagatattcggaaagctggcggttctcgtgctgagcatgccggtcctcatggcgctgcttgagacaataaaggaatttctgtcatgaaaaaatgtatttatgtaatggcggccgtgctgctgctggcggttaccggactggccggcgctgccggcgtaaaagaagtacaggctcacgacagccgcaaagagcagcaaaacagcgcgcaggaaaatagtggagagtcagacggtaaagaacaggaagatccgggagtgatcgaaaataagatcatcagccagttcgactttgacgacatcgatgattccctgaaagatctgttcccaggcgagaagctcgactttaaagagacgctaatggcagtcatcacaggtgacatgtcactgtccgctgacctgctgaacaggcttgtgtcggatcagctgacttatgtagtgcgcagcaataaatccaacctgatacatatacttctcatcgctgtcattgccgctgtgtttacgaatttttccaacgtatttcagaacaggcagatctcacaggtgagcttttacatgctgtacctgctgctgatcgcgctctgtctgaattcgtttgagatagtcattgactgggtggagggagggatccaaaacctgacttcctttatgggggtgttctgcccgctttattttctggcggtggccattgcaaaagggagtgtgacatccattgcgttttttaatcttgtgctgttccttatatatctcgtggagatgcttattgtgaatttcctgctgccggcggtccatatatatattatggtcaagatcatcaattacctgtcttcggaggattatctgagcaagctggcagagctgatgcaggttgtgatcgtatggacactgaagacgctgcttgcctgcatcattgggctcaatgtgatacaggggcttataagtccggctatcgacactgtcaaacggagcgttgtgacgaggggagccgaagcgataccggggatcggggatgccataggcggagtgacagaagttgtgcttgggacggcagtgctcgtgaaaaacggtattggaatgacaggtgcagtcatctgtgtcgccctctgtgtcgttccgcttgtccagaccggcattgtcgtcattatgtataagctggtggcggctctcatacagccggtgtccgacaaaaggatcgtaggatgtgtggaaagcgttggtgacgggtgccagatcctgatgcgtgtcatatttacggtaggacttttatttcttctgacgatagctatcgtgtcggctgtgacgagcggggtgtaaggaggcgttatgtttcagtatttatatgattggatccggaatattgcattttatatggtgcttgtcatggcagccatacaggtgctgccgaatacggactacaaaaaatacataaggttttttacgggtctcgtgctcattttgatgctggcggcgccgatattaaagattttcggtatggataagaaactgacggacgtatataacaatgagacctataaaggagagatcgagcggatagaggattccacaaaatatctggaagatgtggacgtgtctgactatctggggacgccggaagatgaggaaaatgagggagaggccggcaaaggagcggtagaagtggaggagattcatgttggaagatagaaagaaatggacattgaagcttaaggaactgattcccgggggaaagcttaagaaagaccagatcctcatcatccttctggccggcattcttctgctcgtcatcgccataccgtccggttccggcagcagagacaaaggcagcgccaagtccggcggcgccggcgcttcagcaggcagttcagaagcagaccagaattcctatgcccgggagatggaagcgcatctggaggaagtgttgtcgcagatggcaggcgtaggtgatgtgacggtgatgatcaccttaaaatcttcttccgaaaaggtggtggagaaggatgtggaaggagaatcggagtccgtgacagagtccgacagccagggcggcagcaggacgacgcagaattcgagccgaggtgagacgaccgtatacgacggtaacagctcacaggaaggggctccttatataagtaaagaaataagcccgcaggtggagggggtggtagtgctggcatccggcgggaataatgcggtcgtcgttcagaatataactgaggcagttcaagcattatttggcgtagacacgcataaaattaagataatgaagaagaactaaaagaagtggtaaattaggagggtgaacagtgaaacgaatatttaggaaaaaccaggtgattattgctgctcttgctgttatgatcgctgctgccgggtatctgaactattccggcagattattcaatgacaaagataagaccacggagacaagtggagaactggcaaataaagaacttctggatatctcagatgatgacctggccagcgcgtcgggggacattcagagccaggacagcgacagtgaaagcaaagacggaaacgtggacggcactccgggcgaggctgtgctcacaaacggtgaagccagcgctgtagttgcggaagcaaaagtgacaagagagcaggtacgcgccaaaaacaaggagtctctcatggagatcatcgacaatgacaaactgagtgacgaacagaaaaaggatgcggtaaaccagatggtacagatgacagatctggcggaaaaagaagctgccgccgagacgcttctggcatccaaggggttcaatgaggcagttgtgtcccttacggcggaaagtgccgatgttgtcgtaaacgcagaggaactaagcgatgcaaacagggcacagatcgaagacatagtttcccgcaagacgggaattgacgcgcagaacatagtgatcacaccggtacgctctgacggcaaataaccggtagtatagtaaaataagtattgctgcagcatacggcatagtcggtcgggactatgccattttgctgtccgcagctttggaaggaaggggaaaaattcaattgtagattgaaagagggtatggtatactgactaatgatgtttgaatgggatatacttacggtatatcaaaaatggaacggatagatttaggagtgtatatatgtcacagatgagcaatgatattaaaaatgagataaagaaaaggcggacgtttgccatcatatcacatcccgatgcgggcaagacgacactgacggagaagtttcttctctacggaggagcgatcaacaccgcggggagcgtgaagggaaaagcgacttcaaagcacgcggtgtcagactggatggagattgaaaaggaaagagggatctcggtcacctcttctgtgcttcagttcaattatgacggatactgcatcaatattctggatacgccggggcatcaggatttctcagaggatacgtaccggacgctcatggcggccgactcggccgtcatggtcatcgacgcgtcaaagggagtggaggcgcagacgagaaagctgttcaaggtctgcacgatgcgccatattccgatatttacgtttatcaacaagatggaccgggaagccatggatacctttgagcttctcgatgatattgaacacgagctcggaattgcgacctgccctgtcaactggcccatcggttcgggaaagaattttaagggagtgtacgaccgaagggaaaaggaagtagagctgttctctgatacgaagaaggggacgacgcagggagaagtacggaaagtgaagtttaatgatccggagatcgcctggctcatcgatgattctcagagagtacagcttgaggaggagatcgaacttcaggacggcgccggcgcgaaatttgatcaggagcttgtgagcagaggggaactttcccctgtattctttggctcggccctcactaactttggtgtggagacctttctgcagcattttctcaagatgacatcgtctccgcttccgagaaaagcagataaaggggagatagatccgatggaagagccggacttttccgcgtttgtttttaagatccaggccaatatgaataaggcccaccgggaccggatcgcgttcatgcgcatctgctccggcgagtttgaggccggcatggaagtgtatcatatgcaggggggacggaaagtgcgtctgtctcagccgcagcagatgatggcgagtgagcgcaagatcattgacaaggcttacggcggcgatatcatcggcgtatttgacccaggcatcttttccatcggggatacgctgaccacctcaggggaacggtttgcctatgaaggaatcccgacctttgccccggaacattttgcacgggtgcgccaggtagacacgatgaagcgcaagcagtttatcaaggggatcagccagatcgcccaggagggcgctatccagatctttcaggagtataacacaggtatggaagagatcatcgtcggggtagtcggagtgctgcagtttgacgtccttaagtacaggctggagaacgaatataacgtggagatccgcatggacagcctgccgtatgaatatatacgatggatcgagaatgaggatgtggatctggcgaagcttgtgggcacgtcggacatgaagaaggtgaaagatctaagagacagaccgctgcttctgtttgtcaatgagtggagtatccgcatgacgcaggagcgcaacgaaggattggtcctgtctgaattcggacgctaaatatatttgccggactgcaattattcaatatagtttgcaaatagagacaaatttgttataataaaaagaagtgtaaaacgagacaggaggttcatggatcatgggaaaagaagagagaaatgcatatacgataaacgcggatgagaatctgggcgaagtgaagatcgctgacgaagtggtggcgatcatcgcgggtcttgcggcgatggaggtggaaggcgtgtcttccatggcgggaaatgccacgagagaactcatcggaaagcttggaatgaagtcgctttccaaaggggtcaaggtagatgtgctggaggggatcgtgacagtcagtctggccctgaatctgaaatacggctacagtgtcaaggatgtcaccggcaaggtgcaggataaagtgaagactgccatcgagaatatgaccggtcttgatgtggctgatgtgaatatccgcgtggccggagtgcaagtgccggaggaagcgtaagtgaagagaacacaattgagagaacatatcttcaagatggtattctgtatggagttctgcggggaagaggaactgccggaacagctggcgctctacgaagaacagcttgacagcgccggagaagaggacttaaaatacatcagcgggaaatcacggaacattgcagcgaagacagaggagatcgacaggctgatcaatgagcatgtcacaggctggaagacaggcaggatgaacaaggtggacctcaccatcctgagacttgccgtttatgagatgaactgggatgaggatgtcccgacgggggttgccatcgacgaggcggtggagcttgcaaagaaatacagcggcgaagaagggcccgcgtttgtcaacggcgtgctcgcaaagctggctgaataaccgggagtaagtaaaggatgcggaatgtatatacagtaaggcaagtgaacgcatacattaaaaatatgtttacccaggactacatgctcggccgcatttatgtgaagggtgaggtctctaattgtaaatatcacacttcgggacatatatatttttcgttaaaggatgagtctggaacgattgcctgtgtcatgtttgcagggcagcgaggcgggctctcttttcgtatgggcgaaggtcagcaggtgatcgtgatggggtctgtgaatgtatatgagagaagcggttcgtaccagttgtacgcaaaggagatccggctggacggagaaggcgtgctgtatgaaaagtttcagatgctgaagcgggaactggaagagatgggaatgtttgccccggaatataagaagccgctcccgccttacgcacagaggatcggtattgtcaccgcgccgaccggggccgctgtccgggatatcatgaatatagccaggcggcgcaatccttacgtacagcttatactgtatcctgcccaggtgcagggggagggcgcgaaggaaagtatcgtgcgcggcatacagatgctggagcgcgcaggggtggacgtgatgatcgtcggccgcggcggcggttccattgaggatctgtgggcttttaacgaggaggaagtggcgcgggcgatctttgactgttctgtgcctgtcatctctgcggtaggacacgagacagacacgacgatagcagattatgtggcggatctgcgggcgcctacgccttcggcggcggcggaactcgcggtatatgacttccagaagctgaacggtgaattaaacgaggccggcatgcggattgccagactgatgagacagaagcttcagatggagcgcatgaggctgagagaatacgagacaaagcttaagtatctgcacccggtaaataagctcagagagcagcagcagaggcttgtcgatatggaggacaggctgcgcggcctgatggagggcagacttacggccgccaggcacagacttgcggtatacgtggaaaagatgaaggggctgtcgcctgtcggtaagctgaaccaggggtattcgtatgtgcagggaaaagacggtaagacggtgaaaagtatccgagacgtgaaagagaacgacaggctgtctgtctatgtgacggacgggatcgtatatgcggctgtggccggggtgaaggaggaagaacatggctagtgaagtgaaggagacaaaggagcagtcgctgaacgagatcttcgggcagctggaggaagtgataaaggggctggaggcagaagacgtatcacttgaggattctttccggctgtaccacagcggtatagatatgctcagaaagtgcagcgataaagtagaccggatcgagaaacagatgcttgtactcgacgaagagggagagacacatgaattctaaaaatgattttgatatacagtgcagccgtaaggtacaggagatagagacggtgcttcaggattatcttccgagacagaaggggtaccagagcattatcatggaggccatgtcgtacagcctgctggcgggaggcaaacggctccgccccatgctcatgaaagagacatatgatctgttcaacgggagatccaaggcgctcaagccgtttatggcggccatagagatgatccatacgtattctcttgtccacgacgatctgccggcaatggacaatgatgaataccggaggggacgcaggacgacgcatgtagtctacggggaagatatggggatcctggcaggcgacgctctgctcaactatgcatttgagacagcatttaaggcgtttgtcacagagccggaggacagcctgctcatcggaagggcgctcggtgtgctcggtgagaaggccggtatctacgggatgatcggcggccaggtcatagatgtcagggagacgggccgcgacatatcgaaagaggtgctggatacgatatatgagcttaagacagcggcgcttatcgagagcgcgatgatgatcggcgccattcttgggggagcttcggaagaggaagtaaaagcggtggaacagatcgcgggaaatgttggaatcgccttccagatccaggacgatatcctggatgtggtaagttcgtccgaggtgctcggcaaaccggtgcacagtgacgagaagaataaaaagacgacgtatgtcacgctgcttgggatcgaggaggcggccaggacggtggaagagctgtcacagaaggcggtaagcctgcttcaccagcttccgggcaggaatgcttatctggagcagctgctcatgcagctgattcacagggacaaatagagagagtgcctgattatgttagaacgcatacagaaagaaaacgatatcaaaaagcttgatatagatgaactatatgagctgtccggtgagatccgccggtttctcatagagaagatcagcaagacgggaggacatctcgcttccaatctcggggttgtggagcttacgatggccatgcatctcatgttcgagcttccaaaggataagatcatatgggatgtggggcatcagtcctatacacataagcttctcaccgggaggaaagcagggtttgacgaactgcgtaaatacgggggaatgagcggctttccgaaacgcaaggaaagtgcatgtgacgcctttgatacggggcacagctccacatccatatctgccggactcggttatgtggaggcgagggatatcagaggggaagactacagtgtcatctccgtgatcggcgatggttctctcaccggcggcatggcgtacgaggcgctgaacaacgcttcctatctgaagacgaactttatcattgtgctcaatgacaatcacatgtctatctcagaaaatgtagggggcatgtccaagtatcttgcaaagcttcggactgcagacttttatacaggcctgaaaagaggcatcacaaatacgcttcacaaagtacctgttgtgggagactctgcgatcgagaagatccgcaggacgaagagcagtatcaagcagctcatcgttccggggatgttttttgaggatatggggatcacgtatctcggaccggttccgggacataacctgccgcttctgtgcaaggcgtttcaggaggccgggaagatcggcggtccggtactgcttcacgtcctgacagaaaaaggaaaagggtatgagcctgcggaggcatttccggagaaattccacgggattgggccttttgatatagagacaggagaaccggtatcaaagaaagagaaggatacgtacacggacgtcttcgggaaggtgctctgtgatattgcgttacatgacccggatgtggcagccataacggcggccatggcggacggcacgggacttgaccggttccgcagaatgttccggaagagattctttgatgtggggatcgcagaggcacacggggtgacctttgccgcaggtctggccgccggaggggtcaagccggtgtttgcggtgtattcttcctttctccagcgggcgtatgaccagatcatacatgacgttgcgctgcagaatcttccggttgtgtttgcggtggacagggccggccttgtcggaaatgacggggagacacaccagggaatcttcgacctttcttatctgagcagtatcccgaacatggtcgtcatgtctccgaagcataagtgggaactggcggatatgctgcgctttgcggttgcgtataacggtccggtggccgtgcgttatccgagggggactgcctatgacggatatgaagcattcagggcgcctgtcgaatatggcaggagcgagatgatatatgaggaagaggatatcgccatcttaagcgtaggccatatgttcgaggaggctgcgggagtctgggagacgctgaaagagcaaggattcagctgcacgctcgtcaacgccagatttgtgaagcctttggatggagagatggtcgaagcgcttgggaagaagcacaggatgatcgtcacaatggaagaaaatgtgcagagcggaggctttggggagcatgtgctggagtttgtatcgagaaagaagctgcccgttacggtactgacgatcgccctgccggatgattatgtagagcacggcaatattgacgtgctcagaaaagagacgggcatcgaccgtatttcggtggcggagcggatcatgaaagcatacacaggagttgtggaaagtatatgaaagaacggttggatattttacttgtaaagcggaatctggcggcctccagagagaaagccaaggcagtcatcatgtcgggcaatgtgttcgtggaaggccagcgtgaggataaggccggaacgacatttccggaagaggcgaagatcgaggtgaggggcagtacacttccttatgtgagcaggggaggacttaagcttgagaaggcgctgaaaagctttgatgtcagcgtggacggcaaggtctgtacagatgtgggctcctccacgggcgggttcacagactgcatgctgcaaaacggcgccgtcaaagtatttgccatcgacgtcggaaggggacagctcgactggaagctcaggcaggatgacagggtagtctgcatggaaaagacgaatataaggtatgtgacacctgaagatatcggtgaaccggtagagttctcctccattgacgtctcttttatttcccttacaaaggtgctggaaccgatccggaattatctcgcagaccatggtcagatcgtcgctcttataaagcctcagtttgaggcgggaagagagaaggtagggaaaaagggcgttgtcagggaaccgaagacacatgtcgaagtgatcagcaaggtgatctgctatgccatgtccataggatttgccgtgctgaatctggagttttctccgatcaagggaccggaaggtaatatagaatatctcgtccagctggaaaagtgtggcgaaacggaccggatctctgatatgatagatatagaaaaaacagtaggacaggcttttggcatgctctccaaaggctgagaaagaatacttgaggatgggtatggacagattttatatagtgacaaacgacggaaaggacccggagcagcaggtgacgggcaaagtgaaacggctgctggaaaacggcggaaagacgtgtattttatgtgagaaagatgaacagaaagtcatcattgcggaaagtgtgccggatgatatcgactgtgccgtcgtcatcggaggggacggaagccttattgaagttgccaggcttttcagggaccgggatgttccggtgcttgggatcaatatgggaacgctcggctatctcacggaggtggaactgtgccatctggatgacgccatgcagcagatcttgcggggagattatacgaaagaggaccgcatgatgctggaggggatatttgaggacgggagcagcgatgtctctctcaacgatatcgtcgtgtccagaaaaggtgaactgagagtcattcatttcaaactttatgtgaacggagagctgctcaatgcctatgaggcagacggggtgatcatctctactccgacaggttccaccgcgtataatctgtcggccggcgggcctattgtggagccgacggcctctatgatcgtgatcacacccatatgctcccacgcgctcaacacgcgcagtatcgtgctttcggctgaggatgaaatcgtgatcgagatcggacagggacggcacgatacgacggaggaagtgtttgtcacgtttgacggtgcagatacagtgaatcttaagaccggcagcacggtgacgatcaggaagtcacaggcggcaacgaagatactgaaactgagccaggtaagttttttggaaacgctgcgcagaaagatgaaaggaaactaacatcatgaaagttaacagacatgcaaagataattgaacttatcaacaaataccacattgagacacaggaggaactggcagaatatctcacgaatgaagggtttaaagtgacgcaggctaccgtatcgcgggacatacgtgacttgaagctcacgaaggtaccttttgagaacgggaaacagcgttatgcggttcacgaaagtgaaaagagcggcatgagtgaaaagtatatgcgtgtgctgaaagacggttatgtttccatggatatggcgcagaatatacttgtcatcaagacggtggccggaatggccatggcggtgtgcgccgccatcgatgcgatgaagtggaacgaagttgtgggaagcatcgcgggggacgacacgatcatgtgcgcgatccgcagtgtggatgatacggtccgtgttatggataaaataagcaaaattgtcttgtaggaggcagtatgttacaaaatttacatgtgaaaaatcttgctctgatcgatgagatcgaagtagactttaaagaagggctgaatatacttacgggagagacaggggccgggaaatctattattctcgggtctgtcagtcttgcgctcggcgggcgttatacgaaggatatcatacgcgccggtgcggattatgggttcgtggaacttacgtttgtcgtggaaaatgagcggcagacagaaaagctcagagcgcttgacattttcccggaggacggagcggtcgtgctcagccgccgccttatgtcagggcggagtgtgagcagaataaacggagagacagtgcagatggggcttttaaaagaagtgtcatctattttgatcgatatacacggtcagcatgaacaccagtcgcttctgtataagaagaaccatctggagatcgtggatgcgtttgcgagagagtatatcgaagcggtgaaagaggagacggccgcggcttaccgtgattacaagtcgtgcagaaaagagcttgcggaggccgacatggatgaagcgcagcgtgccaaggagcttgcatttctcaaatttgaggcggatgagatcgagaaggctgagcttaagacgggggaagacgaagaactggaactgctgtaccggcgcatgacgaacagcaggaagatagccgacggtgtagctgaagcgcatgcatttacaagtgaaggggagcaaagcgccagcgaggcgctcagcagagcgatacgtgcgctctatgaggcatcggagtacgacgggcgcgcggcggagctttatgatcagcttgtggaggtggacagtctgctcaatgattttaacagagagctgtctgattacagtaaatcgtgtgagttttccgaggaagaatttgccgccgcggaggatcgtttaaatgagatcaatcatttaaaacagaaatatgggaacactatcgatgagatcctggcatatgcggacaggcagcaggaaaagatccgcaggctggaggatcacgaacagtatatcgatacattgaaaaaggcatgtgacaaggctgagaagaaactgaagcaacagtccgcaagactgagcaggctgaggaaagagcaggctgagatccttgaaaaagcgatccaggaaggactgctggaactgaactttgaagatgtcaattttgagattcattttgaggcgctggcggactatacggtccaggggaccgacgatgtggaattcatgatatcgctgaatccgggccagcctgtgaagccgctcgtaaacgtggcgtccggcggcgagctgtccaggatcatgctggcgatcaagaccgtcatggcagaccgggacgacatagagacacttatctttgacgagatagatgtagggatcagcggacgtaccgcacagaaggtgtccgagaagatggcggtcatcggaagaaagcaccaggtcatctgcatcacccaccttgcccagatagcagccatggcagactgtcacttcgtcatagaaaaaacggcatcgaaagacagtacaaagacagatatccgtcccctctcggaagaagagtcggtaaacgagcttgcaagaatactcggcggggccagaattacagatacagtaataaaaaatgccgaagaaatgcgggaacttgcaaaacagacaaaataatccagagtgaaaaacagaaaaactcatatactaagacagacatgaaattgtctgtctttttttgatattgtcataggggtcagacccctatcgcgtcaggggtctgacccctatgacaattctgtacaattttccaggagggtttggtatgcggagatactggtataaaaaaatacttattattattgttacttttacagttgcggtgggcggcagctattatcttattgaggatcagcacagccagctgagacaggaggtgaatgcgagcgcagagtccaagcggatggtgatcccgggcggaatgccgatcggcatttatctcgagacggagggtgtcatggtacttggcacggatgcagttacatcggtggacggtatggactatgagcctgccgcgcatcttgtgaagtcgggggattatattgtggggcttgacgatgaggagatcaggagtaagtcggagctcatatcagcaatgaagaagctggacgaagatgaggtagtgctgaaagtgcgccggacggacaagtatatcaatatcaaactgaaaccggtgaagtgcagcgcgagggactataagctcggcatatgggtccgcgacaatgcgcagggtctcggcaccatcacctttctgaatacggacagccagttcggagcgctcggacatgggattcacgatgtggatacgaatgagctcctggaaattgacgacggaaccctttacacgacgagcatcaaggacatacaaaagggagagaacggagtacccggaggtatggaaggcatcatcatttataataattacaacgtgctcggaagtattgacaaaaatacggaatctggaatatttggccgtattgagcggatcgatgcactattttcggaccagacgccgatcgaggtcggaaataaggacgacataagagagggggatgctgtcatacggtgttccgtggacggcaaagtgaaagactatgatattcgtattacaaaaatcgacaaaaatgccaaggaagtgaacaaaggaattgtcatagaagtgacggatccggatcttcttaagatcaccggaggaatcgtacaaggcatgagcggaagcccgataatccaggataacaaattaatcggggcggttacccatgtgttcgttcaagattccacgaaaggatatggcattttcatagagaatatgttggaacatgtagaatagtctgtaaactgtcgattggtgtcaagtttttacgacagtaatttcttgctttgctatatgacgaaatatataatgaattctgacggtttttatatgaggaagggaggctttacgccaaatgggagaaataaacgtagcgatagccgacgacaatgagagaatattggatttgcttggcgaaataataagcaatgacaaggaacttactcttgtcgggaaggcgaataatggggaggacatgtatgaactgataaggcagaaacagccggatgttgtcctgttagacctgataatgccgaaaatggacggtctgagtgtcatggaccttgtaaatgaggacaaggagatcaagaaacaccccgactttatcgtcgtgacagcggtaggacaggagagaatcacagaagatgcctttaagaaaggtgcgaattactatattatgaaaccgtttaacaacgatatggtactgaacaggataaaacatgcgaaccatataatacgacatgagatgaaacagatgactccgcaagaaacaactttaagccgtcagccggaagttaatctggagacaagagtgaccgatatgatacatgagattggtataccggcccatatcaaaggataccattatctgagggatgcgatcattatggcagtggaagatatggatgtgttgaacgccataacaaaggtactgtatcccacagtagcgaagatgcaccagacaacagcaagcagagtagaacgggcaatacgccatgcgatcgaggttgcgtggagcagaggtaaactggatacactggacgatctgttcggttatacagtaagcaacggaaagggaaaaccaacgaattcggagtttatcgcgctgatagccgacacgattcgtctggaatataaaaacagataagactttccttctgaaataaaatacggtataataatacatatcgtgaggttgggaggaaaatctgatggaaaaaatattatttgtggcttctgagtcagtgccttttataaagaccgggggactggccgatgtagtcggttctttaccaaaatattttgataaagaaaagtatgacgtacgagtgatgttaccgaagtatatgtgcatgaaggatgaatggaaagaaaaactgacgtactgtacccacttctatatggatttgaactggagaacacaatacgtcggtatactggaattagaatacgatggaattacgttctattttatagataatgaatactattttaatggatttgcgccatatggggatatgtattcggatattgagaagtttgcatttttttcaaaagcagtgctcagcgctctgcctctgatcgatttcagacctgacattttacactgccatgactggcagagcggtctcgtcccggtatatctcgataacttccgctatggcaatgagttctacaggggcataaagacgatcatgaccatacataacctgaaattccagggtacatgggatacgaagagagtaatggatattaccggcctgccgagatattatttcgcgccggataagctggaagcatataaggatgccaactatctgaaaggcggcatcgtatatgccgaccggatcacgacggtgagcagttcttatgcggaagagatcaagacgccgttttacggagagaagcttgacgggcttatgaacgccagggcaaacagcttatccggaattgtgaacgggatcgattatgaagattatgatccggcggacgacccgcacattgagaagaattacacagtggacaatttccgcaaggagaaagtaaagaacaagaccgcgcttcaaaaagagctcggactcgaagcagaccatcgggtgatgatgataggtgtcgtatcgaggctgaccgatcagaagggatttgaccttatctcctatgtcatggacgagttgtgccaggacgcggtacagcttgtagtgctcggcacaggggaagaacagtatgaaaatatgttccggcattatgcgtggaagtattcggataaggtgtcggccaacattttctattctgagccgatgtcacataaggtatacgcatcctgtgacgcattcctgatgccgtcgctgtttgagccgtgcggattgagccagcttatgagcctgcggtacgggactgtcccgatcgtgagagaaacaggcggcctcaaagatacggtcgagccgtataatgagtttgaaaagacgggaaccgggttcagcttcatgaattacaatgcacatgagatgcttggaaccgtccgttatgcagagcgcatctactacgataaaaagagagactggaacaagatcgtggaaagaggcatgcagaaggatttctcatggaagaattcggcgaagcagtatgaagaattatacgaaagcatactctgttaacagcagaaagaattgattacatcaagaggagaacagatgaagataaaagatatactgagagatgaggaaccacacatttcatttgaggtgtttcctccgaaaacggatgcgggatatgaaagtgtgctgtctgcgacagaaaaaatagcagcattaaaaccgtcatttataagtgtaacctatggtgcaggcggcggcacgagcaaaaatacagtcaatatcgcatcacatatacagaacgatctgggcgttgtgagcctggcgcatctgacctgtgcttcatccacgaaggaagaggtacatcaggtgatcgaaaagctcaaggaaaagggaattgaaaacgtactgggacttcggggcgatatacccgatgatgtacagttccctgtgtcaaaccagtataaatatgcatttgaactcattcgggatataaaatctcagggcgacttctgtgtcggagcggcctgttatcctgaaggacatgtggagacggaacataagaaagacgatattgagaatttaaaaaacaaggtggagtgcggggtcgattttctcacaacacagatgttttttgacaacaatattctgtacaactttctataccgtatccgcgagaagggaatcactgttccggtgcttccgggcattatgccggtgacgaattccaagcagatgaagagaatatgctctctgtccggaacggcgctgccggagagattccgcgctatcgtggaccgctttggagatgatccgaaggccatgcagcaggctggaatcgcatatgcaaccgatcagatcatagacctgatcgccaacggaataaacaacatacatatttattcaatgaacaagcctgaggttgcaggggcgatcatgaagaatctgtcggacatagtaaaagtataagcttagcataaggggaagacatggatacaaggacgaaggaggcagttcgttacttgggttatgggaaacatgcggtagatgattctacacttgcgctgatcggggaagcatttgaagagctggaccgattggcagccaggcggatcgtctaccgtatttttgatctgaccgtaaaagaaccggactgcatagagattggaaagttatgcatcagaagcagaagcctcggcagaaatatgaaaggctgcgaaaaggccgtcctgctcggggctacgctcggtattgagatagatatgtatatgcgaaaattgagcattacaaatatggccaaggcagttgtcgtacagtcgtgtgcggcagctctgctggaagaatacctggacggctgtcagcttgccatcgagcaggaggcgggcgggcagggactgtatctgaggccccggttcagtcccggatacggagacttttccattgagcatcaggaggaaattgtcaggatgctggatgcagccaaggcgatcggtctgtcggtgactggaagcagcatgctgatgccgtcaaagtctgtgacggccgtgataggactgagcaggacaaaggaaccatgtcacagaaaaggctgtgaggagtgcgggatggcggactgtccatacagaagataaaaacgacaatggcaaaggagaaagtgaatgatatcgcagagacttggtagagaattattattttttgacggcggaatgggcacactgcttcagtcgaagggactgaagccgggagaattgcctgagacgtggaatctgacccaccgggaagaaattattgatatccaccggcagtacgttgaggcaggcagtgacattgtgctgacaaatacgtttggcgccaatgcgctgaaattccatgatacagagtatgatcttgaggaaattgtaacttctgcggtcggaaatgtcagggaagcggccaggaccggtgtgaacgacggacgcagggtgtacacggcgctcgatatcggtcctacgggaaagctgctgaagccgatgggagatctggggtttgaggaggcgtacgaggcgtttaaggaggttgtgcggtacggggaggcagccggcgcagatctcgttcatattgagacgatgagcgacacgtatgaggtgaaggctgcagtgctggcggtgaaggaaaacacggacctcccggtatttgccaccatgatctttgatgagagagggaagcttctgacgggcggagatgtgctctccgtcgtagccctgctggaggggcttagagtggacgcgctcgggatcaactgcgggatgggtcctgagcagatgatgtctatattggatgagatcatgagatacacgtccataccggtcgtcgtaaagccgaatgccggtcttccgaagcagcgggagggagaagtgtattatgacgtggacccggagcattttgcagaggcaatgtgccggatcgtgaaaaagggagcatgtgtgatcggcggctgctgcggcacaacgcccgcacatatcaaggcaatgaccgagcggtgcgcggggcttgtgcctgctgcgccgacgagtaagaaagagacagttgtttcctcctacgggcagggagtcgtccttggggacaggccggtgatcataggcgaacggatcaatccgacgggaaagcgtaaatttaagcaggcgctgaaagaacatgatcttgattatatcttgagagaaggaatcacccagcaggagaagggcgcgcatatactggatgtgaatgtcggtcttccggacatagacgaggtgtccatgatgagggaagtcgtctgcgagctgcagagtgtcacgagccttccgcttcagatcgatacggtagacatagaggcgatggaagcggccatgcgcatatacaacggtaagccgatggtcaattccgtcaacggaaaaaaggaatccatggatgctgtatttcctctgatccaaaaatacggcggcgtagtcatcggacttacgatcgatgaaaatggcattccggattccgccgacgggagagtgaaggtcgccggaaacatcatcgaagaagctgcaaaatatggcatcgacagaaaggatattgtcattgatgtgcttgcgatgacgatcagttccgagccggaaggggcgaagataacgcttgaggcgctccgcaaagtaagggaatgctacggcgtgcgcacggtgctcggtgtctctaatatctcctttggcctcccgttccgtccggcggtcaatgcaaacttttacacgatggctatgcagagcgggctgagcgcagggatcatcaatccatcctcggaggacatgatgaggtcttattattccttctgcgcactcatgaacttcgaccacaactgtgagcagtatattgcacagtacggcagccagacgtctgcgcctgtgcagatgtcggagatgacgcttaaaagcgcgatagaaaagggcctgaaagaggagtcgtaccaggcggctctccggcttgtgaaagagaaggctccgcttgagatcatcaatgagtatctcattcctgcgcttgacgtggtcgggaaaggatttgagaaaggtactgtttttctcccgcagctgctcatgagcgcggatgcggcaaagcttgcatttgccgtgctgaaagaggaacttgccagaagcggggagagcgcgcagaaaaaagaaaaggtcatcctggcgactgtcaaaggggatattcacgatatcgggaagaacattgtaaaagtgctgctggaaaactacagttttgatgtcgttgatcttgggaaggacgtgccgccggaggaaattgtcctcagggctgtctcggaggatgtgcgcctcgtcggactaagcgcgctcatgacgacgacggtggtcagcatggagcgtacgataaagctcctccgcagggataagccggactgtaaagtcatggtgggcggagcggtgctgaacgaagaatatgcggaaatgatcggcgcagatttttacgggaaggacgcgatgcagtctgtctattacgcgcagaagatcttgcagactgcggagtaaggcaggtacagccgctgctgtactataagcaggggaataaattacgcttcatgtttttgatttagtacaagtacggttgttgacagaaatttaacgattcagtatagtggtggaagaagtaaattagtggaaaatattcaggaggaaactgctttatgatgagaggactggatacgacggtcaggaagctgagaagaagagtattcgaggaagttgccagacttggttttaaggcgaacgcagagacgctgaacgatgatatggaggctattccttacaagatggtaaatgaagataccgcgaagtacagggagagtgtgtaccgggcccgggcagtcgtgcgggaaaggctgagactggccatggggctgtctcttcggccggagaataagccggtgcatctgaccgccggcgtggaatccagcaatatttccgacaaatattatgagccgcctctcatgcaggtgataccttctgcctgtgaagcgtgtgaagagcggggatatgaggtcagcaacatgtgtaagggctgcctggctcatccgtgtatggaagtctgtccgaaagacgctgtttccatggtaaagggccgttcttacattgaccaggagaagtgtatcaaatgcggtaagtgtaagtctgtctgcccctatgacgctatttcaaggaaagaacgcccgtgccagaaggcgtgcggcgtgggagcgatagaatcggacaactgcgggcgggcgcgcatcaacaatgaaaagtgtgtatcatgcggaatgtgtatggtgagctgtccgttcggcgccatatcggacaagtcgcagatattccagctggcccgcgcgcttacagagggggatgagatcgtagctgagatcgcgccggcctttgccggccagttcggggacaatatcacgccgaggaatctaaaggccgcgctccaggaactgggattttcagaggtgtacgaggtcgctctgggcgccgacatcggagcggtggcggaggcacatcattatgtcaataaagtgacaacaggagagcttcctttccttcttacttcctgctgtccgtcctgggccatgcttgccaagaagtatttcccggatctgatcgaccaggtatcacaggagctgacgccgatggtggccaccgcccggacgatcaaacaggaacacccggaggcaagggtggtatttgtaggtccctgcgcggcgaagaagctggaggccatgcgcaggaccgtccgaagcgatgtggatttcgtaataacttttgaggagcttcaggcgatgtttgacgcgaaagagatagacctgaccaaatatgaggcggaatcctccttccacaatgcgaccggggccgggcgcggttatgcggtagccggcggtgtggcggaagccatcgaaaaatgtgtgaaggaatactatccgggcgtggaagtaagtattgaacacgcggaaggacttgcagagtgcaagaagacgctggcgctggcaaaggcagggaagatgaacggctgtctcattgagggaatgggctgtccgggcggctgcgtggccggggccggaacgaacatccaggttgtgaaagcacagaaaaagataaaagagttcgtggcagcatcctcgaaacagctgccgccgaaagagttagaagaaatagaactgaaataacagccagggacagggcaaaatgagctggggacgggggaaaattgattttcccccgtccccagctcattttgccctgtccccgcccgttgacaaacagccgggttctctttataattaagacttaagtatcaaatagtcccggacgcctgcggctgacggggattttggatatagaagcaggagggcatatatgcagaaatacggagtaaatgaattgaggaaaatgttcctggagtattttgagagtaagggacatctgattatgaagagtttttcactcgtaccgcacaatgataagagtctgttgctgatcaactcgggaatggcgccgctgaagccatattttaccggccaggagattccgccgaaaaagcgggtcactacgtgccagaaatgtattcgtacaggcgacattgaaaatgtaggaaagactgccaggcatggtacatttttcgagatgctcggcaatttctcgtttggggattattttaaaaaggagtccatccgctggacgtgggagttcctcacagatgtggttggacttgagccggacaggctctatccgtctgtctatctggatgacgatgaagcctgggagatctggaacaaggatatagggatcgcaccggagcggatcttccgttttggaaaagaggacaatttctgggagcatggttcaggaccgtgcgggccttgctcggaagtatattatgaccgagggccaaaatacggctgcggcagtccggattgtacggtcggctgtgaatgcgaccggtatatggagatctggaacaatgtatttacccagtttgacaatgacggcaataataattatacagagcttgaacagaaaaatatcgataccggtatgggtctggaacgtctggcctgtgttgtacagggcgtggattccatgtttgatattgatacgatcaaagcgctcagagaccatgtctgccgcattacaaagacagaatatggacaggatgatgagacagatgtatccctgcgcgttatcacagaccatatccgctctgtgacctttatgatctcggacggaattatgccgtccaatgaaggaaggggttatgtactgcgccgtctgctgcgccgcgcgtgccgtcatggaaggctgctcggtgtggagggagaattcctcgtagagctggccggtactgttattgaaggctccagagacggatatcccgaactggaagaaaagaaagactttatttttaaagtcatagcaaaggaagaggaacagtttaataaaacgatagatcagggactgtccattcttgctgagatggaaacagagatggagaagaacggggaaaaaacactgtcgggcgatcatgcgttcaagctctatgacacgtacggatttccgctggacctcacaaaagaaattcttgaggagaagggcctgtctgtcgatgaggaaggcttcagggcgtctatggaagttcagcgccggacggcgagagaagcaagagaagtgacgaactatatgggtgcggacgctacggtgtatgagtccatcgctccggaggtaacgtcagagtttgtcggctatgataatctgagctttgaatcttctgtgacagttctcacgacagagacggagatcacagatgcactgtcagacggagacagggggacggtatttgtagagaagacaccgctttatgccacgagcggcggccaggaggctgataaagggtatatacgaacggcagacggagaattccgtgtggaggatgttgtaaagcttttaggcggcaagatcggccatgtcggctatgtgacaaaaggtatgatcaagacaggagatacggttacacttgaggtcgatgaggagaacagggcgctgtccgcgagaaaccacagcgcgacacatctgcttcacaaagcgctgcggactgtccttggaacacatgtagagcaggccggttcttctgtaaatgcagagaggctccgctttgacttcactcatttctccgcgttgacgaaggaggaactgaagcaggtcgaagagatcgtcaatgcgcagatcatggctgctctgccggtcaaggtagaaaatctgccgatcgaggaagcaagaaagacgggagcggctgcgctgtttggagaaaaatatggcgatatcgtacgtgttgtcagcatgggagatttttctgtagagttctgcggcggtacgcatgtggaaaataccggtgtcatcacggcgtttaagatcatttccgagacgggcgtcgcagccggcgtgcgccggatcgaagcgctgacatccaaggggctgctggactattacgacgagcttgagaagcggcttgcggaggcggcaaagcttgtaaaagcctcaccggataagcttgcggaaaagatcacacatcttctggcagagaacaagacactgcacagtgaggtggaaagccttaagagcaagctcgctcaagatgcaatgggcgatgtgatggatcaggtcacagaagtgaaaggcgtgaaactccttgccacggaagtggagggagtggatatgaacggactgcgcgatctcggcgaccagttgaaggataagctgggcgaaggagtgatcgtcattgcatccgctgccggagggaaggtaaatctgatggcgactgccacgaagggcgccatagaaaaaggagcccacgccggaaaccttatcaaggcgatcgcaggccttgtcggcggcggtggcggaggacgcccgaacatggcgcaggccggaggtaaaaatccggacggaatcagcagcgcgatcgccaaagcgggagaagttcttgaggaacagttatcatagggcataaacttctttgtcataagattaacgtcataaaaataactatggttgacaaatttaccgggcacacatatactaagtaaagaataaagccaggtgaagcggcgaggaagatttctgcctgatatacggcagaaaaccgatgaagcaattgggaaggctcctaatctttccaagaaactttcaggtgcaggtacccgccgtggatgggactctggaaagagcctttaaaggccaccgtagaagtaaagctttcaggtaaaaatacagagggtataggatacgctatcagtacgcctataccctcttttgtattgtctgaatagtgtgagaatcttcataggggtcagacccctgtgggcaaaggggtctgacccctatgaaaatttcggcgaaggagaatgtattatggaacaaaaacgggaattgaagaaaaatttaggtgtggcgactgccatggctctggtcgtgggctgtgtgatcgggtccggcgtgttttttaagccgcaggctatttatacggcaacgggaggggctcccgggcttggaatgatcgcctgggtcatcacaggtctcgcaagtattgctgcggctcttacttttgcggaagtagcgatcatgataccaaagacagggggaatggttgcttatctggaagaaatctataatccggtagttggttttctggcgggatgggtacagacgattctgttttaccctgctatgatctcggcgcttgcggttgtgtgcgcgcagcaggcaggtctttttatcggggaaggctttactgtgccgcttgcgatcggcatcataattttgatcatatttttaaataacctcggctcgaaggtcggggggagcatccaggttgtatttaccatatgtaaactgatcccgctcattcttctgatgatttttggatttgtaaaaggcagcggcgcaaaccctatcttcagccctatggttggtgacggactgagtccggcggtggtgctcgggcagctcatggtcgccatattatttgcctttgaagggtggaccggggtcggcgcgatcgcgggagagatgaaaaatccaagcagagatcttccgatcgcgatcgtcggcggtgtgtctgtgatcatgggtgtatactttatcatcaatatcgcttatctgtgggtgcttccggcaagtgaactggcgacgctcacggctccggcatccgcggtggctctgaaggtgtttggtgacatcggcgggaagatcatctcggtcggcatcatgatatccgtgttcggagcctgcaacggctttgtgctgtccggctcgagagtggcctattctctggcagcggaaggcaatttcccgtacagccgtaatcttgcgaagctgaacaatgcacaggttccaacaaattcgatcatcctcgtcggcgggatcggctgtatctatgccatcagcgggcagtttaacctgctcacagacctggccgtattctcaagctggaccttctatacgctgacctttatcggtgtgatgaagttaaggaaagaccgcccggacgcggtgagaacatataaggtgccgctgtacccggtcgtgcccatcattgctgtcgtcagcggagtatatgtgatcattaaccagctgttcatgtcggggctccagtcaacggtgctctcggtgggaagtattgtcattatgttgataggccttccggtgtattctgtagttatgaaaaacaaagaaaagaaaaaaactgcagcaaatgccgaaaaaatattgacgtagtagaaatatgtgctataatcttatgtagtgcaataaatatacccgaacagtcgtatggtgcacaatataggactggagggaggttaggtgtgagtctatgtcaaatgtaatcgtaaaagaaaacgagacgttagatagcgctttacgcagattcaaaagaaactgcgccaaagcgggcattcagcaggaaattcgtaaaagagaacattacgaaaagccaagcgtaagacgtaagaaaaagtctgaagctgctagaaaacgtaagtataactaatatgtgcagataaatagagtgttggggtacaacactctatttttacgttaatgaaacctttcggcagaagtacctaaggaagagcagaggtgataaacatgtggtggaataaagtgatatttggctggagcgcgtatcatgtcgtgctgtggttccttgtttacagtatactcggatggtttgtggaatctgtctacatgtcattgtgcaaccggaaaataacaaaccgggggtttgcgcggtgtccggtatgtcccatttacggtgttggagcgctgactgtattttttatgctgcagccgtacagtgaacatcccgtgaagctgttttttatgggaatgctgcttgccacgtctatcgaatttatcacagccggaatcatgaacaagatattcggtgagatatggtgggattaccgccggaaaccatttaattataaagggatcatatgtctggagagctctattgcctgggggttctacacgctggcgttgtttgctttcctccagaatatgatagttgacatcgtgggtgtcatacctgttatgataggaaggatcggcggaagcattttgatcattgtttatgcggtggatttcttcattactttatacagggagaaaaaggaagatattccggaacgtctatggcaggtaaaggacagactgctggacaagctgtcgaaggaatgatatacataggaaacaacaattgacggatcaatggaaaaggtctatactgaaaatgtcacagacgaggacgtcgtattttatatacggtgtcctttttttatttcagaaaactgtatatacggcgcagaagaaagtgaggagattagtatgagactgagagaaaccgggcttacggccgaagaattgaaggcaatgacagataagtatatggtagagacttatccaaggtatgattttgtcgctgagcgggcggaaggaatgtacctctatgatgagaaaggaaatgcctatcttgacttttacggaggagtcgctgtaaacagtgtgggaaacagaaatcacagggtgatagaagcagtcaaagaacaggcggatgatatcgtgcatacgtttaactatccgtatacggttccgcaggcgctgcttgcaaagaaaatttgtgacacagtagggatggacaaaatattttatcagaattcaggagcagaagcgaatgaatgcatgatcaagatggcgagaaaatatggaacagacaaatacggaaagaatcgttatcatattataacggcaaagaatggattccatggaagaacctatggcgctatgtcggctacagggcagccggacagtgccgtccaggaaggttttatgcctgtggttccgggattttcatacgcagaattcaacaacctggaagattttacatccaaggtgaccgcagatacgatagctgtcatgatcgagcctgtgcagggagaaggaggtgtatatccggctacaagagagttcatggaaggactgagaaaactttgtgatgacaaggagatgcttcttctgctggatgaagtgcagactggatggggaagaacgggcgccgcaatggcgtatatgggatatggagtcatgccggatgccgtttcaatggcaaaggccatgggcggcggcgtgccgatcggagcctgttgtgcaagaacggaagttgccgaagccttaagcgccgggagccatggttctacttacggcggaaatgcacttgcatgtgcagcggcgcttgcttctgtatcagagattctggacaacaacttaagtgaaaatgcaagaacagtaggaaaatatctcagaaaaaagctcgcagaacttccccatgttaaagaagtcagagggcgcggcctgcttgtgggctgcgaatatgatattccgatcgcggcagacgtgaaatggaatgccctgaaaagaagggtgctcataacagctatcggggacagtgtgaaccggatgactccgccgctgacggctgaaaagaagcatgtagacagacttgtggcagccatgagagaagctatagaagaagcggcagaagaacagatggtcaaagcaggctgatccgtatattgtttacaataagccctacggtcacggaggccatgatagtgccttttacagccataataaatttcaggatgacaaagacagttcctcccgcaagtgaaatcttcagggcgttttttcgtattttactctgtgaaaatcagtgtccatggaacgcactcctgtctaattcgtgatatagacgtgcgatgggcagcccgacgacattgttatagtcgcccttaatacattttacatgaatggcaaagggtccctgaataccataggctcccgccttgtcaaaaggatctcctgtagcgatatagtcctgcatatcatggtgggaaataggataaaacgttacatccgtcacttcataaaaagtgtggaccgccggtgtccgggcgcttcctgtaacaagtgagaccccggtatatacctgatgtgtgcggtcggacagaagggagagcatatcaagcgcctccccgcgtccggaaggttttccgagtatttcgtccttgtatacaacgatcgtgtcggcgccgatgacagtacatgtatcttctgacagtgtccggcatacatgaagcgccttctggcgggccagattcattacgatctcgggcggagtgccgccggagatcgtctcttctatatcagccgggataatatcaaaggcgaagccggcctgggctaataattcctttctgcgcggtgacgcggaagccagtatatatttcataagaattcctcctttttacaactgttataaatgacccgttaccgggccgctatgttcattatgataataagataccacatttgtgccggctggaacatataagaatgaaaaactctattatttaccgcgccggaaagcgtcctgttggaattacggcaaaggctgtttgatgaattggtctgtttctaagcagaatcagacagagaagaatttaacgaaattccctttataaatgcggacggttatcgcagcaaaacgatcgcggaattttcgcaacagctggatccggatgcccttttcccgtcattggatcatgcatattgaagcgtgtctgcgcatcgaaaataaaatagacggaaggaaagcgtaaatctcggggatacatacggctttatttttttctagttatgctctataatgaaatacgtgaaaatatattgaatgaaaataaaagtaatggaggaatgaagatatgtacatcagtgagattacgactactgcacccaccgatgagaggatgccgctggaacggaaaatgtatgagacactcgataaattgaaaataccgtatgagcgtgtggataacgatcctgcggcttcgatggaagaatgcgcggctgtcgacaaggcgatcggaacggagatccgtaaaaatgtatttctttgcaatcagaagaagacgacatttttccttctggtcatgcctgcggacaaggcctttgacacagcttctttcagtaagaaactgggcgtgtcccacatgtcgttcgctccgccggagaagatgctggagcaccttggcactacccctggttctgcaagcgtggcagggcttctgaacgatgaggatgactatgtacaggtgatcgtggataaggaagtggcggagagtgagtggtttgggtgcaaccccggaattaatacgagccatctgaagtttaagacaaaggatctgctcacgaagtttctgcctcatgtgcatcacagggcaaggatcgttgagctctgaaacagatgtcggacgtatttattataatagagtaaggggcagggacatatgaaatcagaaacagagttaaaacagttgttatacagcattgaccataaggggtatccggcatataagggtacgagaggcagttaccggttcggcagttatgaattgtccattgaccatgttcagggcgatccatttgccgccccgtcgaagctgagtgtgaaagtggcgggccgcaccgcgggatttcccggccggctgtatgatacaaaatataagcgcattgcgcttcaggactacgtgacgagacagtttgccgcccaggccggccgttatacgtttcaggcgaaaggctcaggtaagagcggcattatatcggtgacccgctgcgggcaggaggtgctggagcggacatcctgtacgatcgaggagcgaacaggtgacgtgacagtgcggtttgaagtcggatttcccgcaaacggacgtacgatcaatgcgagagagctgatcaagatactatatgattatctgcctgtgtgtgtggaaaaatccatgatgtacaaggagctgaacgccggcaaagtagagaaagtcatggaactgagtgtggacagggaatttatacgggaggaattaaagcggcttgaccttgcggccttcgtagccaacggttcgattcttcctagagagtccggagtctcccagagaccgatgaaggacgcggttgcatttgtgtcgccgggatcaatggaagtcacgcttgaactgccttataaaggaacgctcaccggcatgggagtgaaaaaagggatcacacttatcgttggcggcggatatcacggtaagtcaacgctgctcaaagcgctggaagccggggtatatccgcacatttccggggacggaagggaatatgtcgttacggacagcaccgcagtcaaattaagggcggaagacgggagaagcatcaaacatacggatatctccatgttcatcaatgacctgccgaacgggaaagatacaaaagcattttataccgaggatgccagcggcagtacatcgcaggctgccaatgtggtagagagtcttgaggcgggagcgaaagtatttctcatagatgaggatacaagcgccacgaactttatggtccgggatgaactgatgcagcaggtcatccaccgcgatatggagccgatcacgccatttatagagcgggtcggtgacttgtataagacgtacggtatctccaccattatcgtggccggcagctccggggcttatttccaggtggcggacgagatcatacagatggaccgttatgtgccgaaggaaattaccgaagcggcaaaagcggccgcaagagaatatccaagcctggaactgccgggcgataagccggaaatgccggaattcaagagattcgtaaggagcaatccggacctgaagcagaaggggcgcatcaagataaagacgctcggaaaagacggagtacagctgaaccacgatacgatcgatctgcggtatgtggaacagctggcggatgcagagcagcttacctgtcttggccatatcgtaaaatatatggaagaacatatgatggacggcaggacaacgatgcagcagctcatagaaaagctggcggatcaaatggaaagctctgggtttaaagtgatctgtgaagagtcttatctcccgggtaatctggcaatgccgagaaaacaggagatctacgcatgcctgaaccgttacagacggttggggacacgttaaaatgaattggggacgggggttttttaaaaaacccccgtccccaattcattttaacgtgtccccggtgtctagagcagcaggtcgttcagggcgtctttcagcgcgctctggtaacttacttcatctacggtttctccggccacgatatctttgctgccgatttcttttccggccagataatatttcatctcaccgattttggttcctttttttatcggagctttcagtttctttttcataacctttttcttttctatgctgttcagatccgccccggtagtgtctatgtacgcaaatggctctgtctgctcagccttgactgtcttttttacgccccgcgacagtgagacgggtttgatggaggcgattttgtcctcctcatatttgttgcactttccaaagccatagttcagcagcgtggtggcgtcgctgaaccgtgccttatggtccggggcagccatgatgaccgcgatcagttccatgccgtttttctcagcggtggcggagacgcagtatttggctttgtctgtggagccggttttcaggccggtcgcatattcgtactgccgtacgagcttgtttgtattggtcagtccgaattcggtagttcctttattggtggtatgtgttatgttttccatccatatcatggaatagtcccggatctgcgggtatgtagtgatcaattcgcgggacattaaagcgatgtccctggctgtcgtgaggtgtccgtctgtatcaagaccattgcagttcacaaaatgtgtattggtcatgccgagtcctttggcccgttcattcatgttcttgacaaattcctcctcatttccacatatgtattctgccatggcaacgcaggcatcatttgccgaggccactgcgatacattttatcatcgtgtcgacggtctgtgtctcgccgggttccaggaagacctgagaaccgcccatagaggcggcaaactcggacgtcgatacagaatcgtccaatttgattttaccgtcctttaaagcgtcgaatatgagcagcagcgtcatgatcttcgtcacgctggccggcggccgctgctcgtcggcatccttttcatagatcacctgcccggtggacgcctccataaggacagccgacggtgcggagaccgtaagaccggaagcggcatcctggccgggttcagattccgaaccggcgtctgtgccgtcagcagcgccggcctcgttgtttttctcctgctcctggcccgtgtcctcttcgtagaggagggtattgtccggcggtgcggcaagagcgacagactgggtacataaaaatacgcatattagtagagcaaagaatcgcttcattggcaactctccatatagattctattattaccagtgtagtggaaagagtgaaaaaatatgaccggggacagggtaaaaataaaaagggacacgttgaaatgagttggggacggaggttttttaaaaaacctccgtccccaactgccttaaaaaaattaaattgctcttgtgtatcgtctgagccattctttttcgtcttcgctcagatgaggggagacgatgtcgtatactttcgcatggtatgcattcagctgatccttatctgcctgggacagcagttccggcttgacggcgtccagatctatcggcacataggtgatcggttcaaaatagaggaactgtccatattccgtacagtcaccttttcttacgaccatctcgttttctgttcggatgccgtgggaaccttcaatgtaaagtcccggttcattcgttatgaccatgccgggctccagcggatgtttttccttttcgcggatcgcgcagcggaagccggtaggcgcctcgtggatgttcatcaagtatcctacgccgtggccggtaccgtgattgaagttctggccgcgctcccagagcggctgtctcgcgagcacatccagattataacccgtagtcccgtagaggaacactgcggcggcaagatggagattgcatttgagaacagcagtgaaatcttccttcatattttccggaacatcaccaagggcaaaggttctggtgatatcggtggaaccttcatagtatcctccgccggtatcggtcaggaagagagaaccttcctttagagggacatttgtctcgggagtggaggtatagtgcacgatcgccccgtgttcgccgaatccgcagatcggttcaaagctctgccagagataaccttcctgttccctgcggaattcctccagtttgtcggcagcgctcagttcggtgatctctgtctcaccgacattttgtttcagccagtacatgaactttgtgacagctacaccgtccttaacatgcgcattgacgatatttttaagctccgtgtcatttttcatggccttcatgacgatcgtcggattgtcctgttcaattatctttgcgcctttcgggatattattatacagcgcatagttcaatctggaaggatccacgagtatggcatccgtgtccttaaatgtttttacatcttcatacaccgcattgtaaggatgcagggaaatatgatccgcagcaagctttgctttcatgtccccagtcagcttcttctcgtcgatgtaaagcttcatttcatccattgtgatgacagcataggagagcagaagcgggaaaaattcgatatcattgccgcgcagatttgtcgtccagcagacgtcatccagcgccgcgataacgtggatatccgcgcctgcggctttcatggccccgcggatacgagcgagtttttcggctgtagattcgcccgtatatgtttccccaagagcaaaggcaggctcctctgaaagcggcggacggtcagtccatatcttgtcgatcagatcctcggaataatcgatcgttccgttttttggggcaacggccgcttcaagagcctgtccttcccccatcgcaacgacacgtccgtcaaatcccaacgttccgttttccggaagcatatctgtgataaattcttcaacagaaggtacgcccggttcccccattttgaacagcttgacgccgcttccctcaagctgcctggcagcctggataaagtacctcccgtctgtccacaggccggcctcgtcctgtgtgatcacggcggttccggcagaaccggtaaatccggtgataaatgctcttgctttgaaatgttccccaacatattcactctgatgattgtcgtctgtcggcaccatatagatgtcgaagcccttttctgccatcaaagcacgcagagcggtgagtctttctggtatattcatcttaaaaacctccctttttagaaatgatctttaattgatctctaataagagattctaacatatttgtttgcaaaaacaaaggaataattatataattatcacgataaaaaggagcagaatatgttaaaagagaaaaagtattttttatttgatattgacggcactctcgctgtggatgacgtgctgtttgacggaagccgggagcttatcgctcatatcgcgtcgatcggaggccgttccttctacattacgaacaattctacgaaaagcagaaaagactatatggaaaaatttaagcggtggggcatccagacggacgaagaccagtttatcacggcgtcctatgccgcctgccggtatctgaaagagcagtatcacggcaggaagctctttgtcatgggaacgccttcctttgtggaagaagtaaaaagctgcggatttgaagtgacggagcaggctgaaaaagatgttgcgtgcgtggtggtcgggtttgacagaacgctttgttacgacaaggtggaggcagcctgtgaactgctgttccggccggaggtggattatatcggcacaaatccggattacagatgtccgacgtcctttgggtttgtcccggactgcggcggcatatgcgaaatgctgaatgtgaccgtggaccggaccccgcgttatgcaggcaaaccagataaagggatcgtgacgatgtgtatggaacaggtgggggcaaagcctgaggaagtgcttgttgtgggagaccgtctgtatacggatatcgcatgcggcatccgggcaggtgtggagaccgccctcgtattcacgggagaagcgaaggagaaagaccttgcccaaaccgaatttcggccggatcatgtgtacagagatatcaggcagctatatgaagacttccgcggacaaggagaatgataagtgacggccattataataacaggaatcataatcgtgctctgtatcctgctggagatccggcgggagatgcgcacatttcaaatgacgaggtacaccgtgcgctcccgcaggcttgccggcatgaaaggaacgaaaaagatcctgttcctgagcgatctgcacaaccagacatacggagcagaaaacagcaggcttgtgagcgcggtgctgcgtgaggatccggacctgatcctcctcgggggcgacatgctcgtagggaaaagaggacattcctatgagccggcgcttcagtttataaaacagctcgcaccgatatgccctgtcttctatgcagatgggaatcatgaacagcgtgtaaaaaagaggccgcaggaatacggtctggacatggaccgctatgtacaggaacttggggaagcaggggtgcggtttctcagcaacgaatctgcctgcatggaactgggcggcataccggtccgtatctatggcctggaaataccggagcgctgctacggacatttcaaaagagcgtccatggaagcggaggaaataactcagaatatcggcaggcgcgggccggactgctataatatactgctcgcccacaatccgggctatgccgacgtatacagagcgtggggggcagaccttatactgtcggggcactatcacggcggaatcgtcaggatcccgggtatcgggggacttgtggcgcccggctttttcctgtttccgaagtattccggggggaaatacgaggaaggggacagcaccattgtcgtgagcagagggctgggcatgcatacactgcctgtcaggctttttaatccggccgaagtggtggtgcttaagctgaagggacagcaataagcggtattcctgcagatttaaaatatgagaaagaaaacttgtgcaaacagccgggaacctgtataataaattagttatacttattgaatcatcgttgttcaataaggcacggcagaatgaaacagaggagtaattatgggaataccagtgaaacttcaggtgtttgaagggccgttggaccttcttcttcacttgatcgacaagaataaaattgacatatatgatattccgatcgttgagataacaaaccagtatatggaatatatccgggccatggagaaggaagacttaaatgtgatgagcgagttcctccttatggcggcgacgctgctggatatcaagtgcaggatgctgcttccgaaggaagtgaacgaagaaggagaagaggaagaccctcgtcaggaactggtagaacagctgctggaatataagatgtacaagtatatgtcctatgagcttaaagaccggcaggtggacggggaaatggtgctgtataagaatcctacgattccggaagaagtgctggaatacgtagagcctgtggatatggatgcacttctcggtgaactgacacttgtgaagctgaaccgtatcttcagggacgtgatgcgcagacaggtcgacaagatagacccggtgcgcagcacattcggaaagattgaaaaagaagaagtcactctgcctgagaagctggatcatgtgacagaatatgccaggatacataagaaattcagttttcgtgaacttttagagaagcaatgttccaaggtgcagcttattgtgacatttctcgctgttctggaactgatgaaagtcggcacggttttcattgagcaggaacagcagtttgatgacattatcattacatccatgttatagatgagagtgggaaaggtagtatggaagaagtggagattcgtaagttagaaggcgtgatagaagccattttatttaccatgggggagtcggtggaactgagcaagatcgcttccgccattgaacatgatgaagatacgacgaggaaaataatccgtcagatgatggtcaggtatgacgaggaggaccgcggagtgcgtatcatagagttggagagttcctttcagatgtgtacgaaaaaagagatgtacgagtatctgatcaagatcgcaaagcagccccgcaaatttgttctgacagatgtgctgcttgagactctgtcgatcgtggcatacaaacagccggtcacgaagctggagatcgaaaaaataagaggagtaaagtcggatcatgcggtaaacaagctcgttgagtataatcttgtctgtgaagtcggcaggctggacgcaccagggcggccgctgctattcggaacgacggaggaatttctgcggagattcagcattcagtctgtagaagagcttcccagcctcaatcctgagcagatggaggactttaagacagaggcggaagaggaagtgcagcttaagctggatgtatgacagccgcggcccgaggaacaaaaatgttcatagtatccgcgcagagaacatagattacagtaacacagattatatgcggtgctgtatatgaaaaagaaatactggatattaggtatgataatgacgatagttttttccgcttttccttccaccggcacagctgccggggatggagacatcccggaggaactgtcgcagctatacgcccggtccgcagttcttatggatgctgacagcgggcgtgttttatttgggaaggatgaagacgtggtcaggcctatggccagcacaacgaagatcatgacctgtattcttgcgcttgaaaatatgcaggaggaccaggtgacggcagcatcggatcatgctgcaagccagccaaaagtccggctgggagtaaaagggaaagaggaattccgtataaaggatcttttatattcccttatgctggagtcccataatgacagcgcggtagtgatagcagaagggatcgccggatcggtggaggcctttgccggcatgatgaatgaaaaggcggcagagcttggatgcagcgatacatattttgtgactcccaacgggctggatggttatgacgagggggggacacactcaacgactgccagagacctggcagccatcatgaaatactgcatcaaggattccccaaagaaggaacagtttctggaagtgacccggacgaaggattacagcttcacaaatgtgaaaggtgacagaagcttttcctgcagcaaccacaatgcctttctgactatgatggacggagcgctgtcaggcaagacgggatttactgcagacgcgggatactgttatgtgggggctcttgagcgggacggaaggacgtttatcgtggcgctcctcgcctgtggctggccgaacaataaaggatataagtggaaagacacgagaaagctcatggaatacggagtggccaattatgagtatcagaccgtatggcaggatatgaaacttaaagacgtcaatgcagaacgcggcattgagaaggggaatgaattcggaggggatgcaaagattccggtcaagatcgcggatgcagacaaagaatttaaggtactgctcagggagggggagaaggtagacataacatgtgacgtcaaaaagaagctcgccgcgccggtagaggaaggaaaaaaggtcggcacggtcacctatacgctggacggagaagtgctgaggcagttttccgtcgtaactgcgcagtccgcggaaagaaaagacgccgggtggtgtgcagagattcttttaaagaaacttctgatgcagtgagaaatcatccattaataaatctaatatccccatgataaacggtaatttcccaaacctccggacagatgatactatataagtgaggaaagaggaaacgggttcatgaggaggaggtgtcattatgggaaatatcataggatgggtcatcgtagctgcagcggcgctgtatggaatatatatagtaatatctgacagaaaaaagcacttctagcctgaaacaggcggtaaaggcggaaagagtaagaagcggctgcggtctgaatgcttgtgtatgaacagcagacagactgcagccgttttattttcagataagattcttttttacatactgaagaaaaagtttcatggccggtgaaagatctttggaagaacgaagggcaattccaagattgcggtatgcgttcggcacgagcggacgcgtcacatagtctccgtcgtataaggagagaaagagacggggcatgatacttacgcccagtccgtgttccaccatagaggcaatggaataatcattctttccggtaaattttatgtccggcgtgatcccggctttttcaagcagcgggtgtatatcggcgtcatttacccggtcgtatatgataaatggctggttttcaaaaagctctatcggtactttttcaagctttgtgtacggatgtcctaccgggaggactgccaggagagggtcctgctctacatggataaaatcatagcttttatctttctgaaaactggtaagtccgatatccacggtgaaatcttcgagccacttcgcgatctcgccgccgctgccctccatgatctgaaatatgatgcccgggtagtcggcctggaaccgccggatgatgtccggaagccagtgtatggagcagctgacataagtaccgatacgcagcgtcccctttttcagccccttcagaaatgaaatctcctgattcaccgtttcgttggaaaaaagcagcgcccggatagacggtagcagtgcctcgccctccggtgtgagagacacacctttgtggcctttgtaaaacagcgggaaaccgacctcgttctcaagcgatttcatcatctgcgtgatcccggactgtgtataaccgagcttttcaccggcttttgtaaagctgccgagactgatggcagtcaacagtacctcacatttttttagatccataagcttcgtccccctttcgcaacgggcgggatgtgtgtttctgcgcctctatttgattatataacagaacaggcggagaaagaaagatttaaagggtggatttttctgcagatatatgtataatctacagtatatgatcatgtgcaggccccggatgccggggacagatgaaggaggagaaacgatgtcggtagaaaaggtcagggagtatttccgccagtatggcatggaagagcgggtaaaagaagtggacgagtccagtgccacggtggagtcggcagcggcagcgctcggctgtgagccgaagcgcattgcaaagacgctgtcctttcgcgcgggggaagctgttcttctcatagtgacggcaggcgataggaagatagataacaaaaagtataagcagcggttcggatgcaaggcacagatgctcagggcggaagaagtagagccgcttgtgggccatggtgtgggcggggtctgcccttttggcataaatgacggtattgatgtgtatatggacgtgtcactgcagagatttgaaacagtgtttccggcggcgggaagcggaaacagcatgatagaactcgggatcgatgaactggagcggtacggaagaagcagcggctgggtcgatgtgtgccgggagcgtgaagaggcggccgccgaaaaataacaggctgcagcgttgcaaaaaacaaaagattcttttataatgacagcatggaagaatcgtttggaggctggtcttttctttatataatctcaggagtatgaaaggagggagcaggcggtcagatatatttttatacacgtatttttcacacattaaccaccggagcagtgtcactgctccggcgtcttgacaaggcggtatgccttttttgaaaaatcacagccgtttctggcaaagaccacattttgatcaggaagaagagaaaagcagaaatattctttcatttttgcctatattttgttgattttcatattgacatttggcggcaattataatactatattaatcgaggaacgaacattcgttcggtgacgagaaggagagcatgttatggtaagtgatgataagaaaaaagcgctggatgcagcgatatcgaaactagagaaagattttggaaaaggcacggtcatgaagctgggtgatccggcagcccaggtgcaggtggagactgtaccgaccggttcgctgagccttgaccttgcccttgggcttggcggcgttccgaagggacgtgtcgtggagatatacggccctgagtcaagtggtaagacgacggtggcgctccatatgatagcggaagtgcagaagcgcggagggatagcgggctttatagatgcggaacatgcgctggatccggtatacgccggcaacataggcgttgatatcgatgaactttacatatcacagccggacagcggcgaccaggcgcttgagatcacagagacaatggtgcgttccggcgcgatggatatcgtagttgtcgattctgtggcggcgcttgtgccgagacaggagatcgaaggcgatatgggggacagtcatgtagggcttcaggccagacttatgtcccaggcgcttagaaagctgacacctgtgattagtaaatcaaactgtgtcgtgatctttatcaaccagctgagagagaaggtaggcatcatgttcggcaatccggagacaactaccggaggacgcgcgctcaagttctatgcctctatccgcatggatgtcagaagaatcgagacattaaagcagggcggagagatggtcggcaaccgcacaagggtcaaaattgtaaagaataagatcgcgccgccgttcaaagaagccgagtttgatatcatgttcggaaagggcatctcccgagaaggggatatactggatctggcagccagcatcaatgtgatcaataaaagcggcgcatggtatgcatacaatggagataagatcggacaggggcgtgaaaacgccaagatttatcttgcggagcatccggatatactggaggcggtagagacgaagatacgggcccattatcaccttggtgaggacgcgcaggcagcggcagaagaggccggagaacaggaagacaagaagaaggaatccaagaaaaaggaagaggataaataacaatgacagtcacaaagatagagcctgtgacaaagacgagataccggatatatgtggacggacagtttgcctttatattgtataaaggcgagctgtcccgttatcttatagcggaagacgctgagatcacagaggagacatatgagacgatccggacagaagttatattaaagagggtaaagcttaaggccatgcacctgctaagcgacatggaccggacggaaggacagctgaggacgaagctgaggcagggaggatacacggaagatatgatagacgcggccgtggattatgtgaagtctttcggctatatcgatgacgaagcctatgtgaaaagatttatagccggcaggaaagataaaaagagcagaagggaaatatatgcggcactctgccggaaaggaattccaaaggaacagatagaggcggctatggaagactgttatgaaaaagaggattcctgtgcagccatacggaagatcctggaaaagaagaagtatgatcccgccacggcaaaagacgaggaaaagcgcagaatcatgggctttctgacacgcaggggattcagttatgacgacatccgtcaagtaatacaagtttctgagtggaatgcttgacatctttgtgaaaacagtataaaatttaagtgttgtatttgtacaatgaaaattaaataaggaggtgctcctgtgccgataggaatagtaattgctgtagccgtggtgcttgttataataacagcggcagtcagtcattttgttacggtctccaatctgaagaagaatgcagaatccaagattggaaatgcggaaagcaaggccagagaaattattgacgatgcggtgaagacagccgaggccaaaaaaaaggagtctctcttggaaatcaaggaagagtctatcaagaacaagaatgagcttgaaaaagagacaaaagaacgcagagcagaattgcagcgttatgaaaaaagagtcctttccaaagaagaggcactggataagaagtcagaggctatcgagaagcgcgagtcagggttcgcagcaaaagaagaacagcttaagcagcgcgaagcgaaagtggaagagctgagtaagcagcgagtacaggaactagaaagaatctcaggacttacctccgaacaagcaaaagaatatttgttaaaaactgttgaagaagatgttaaacatgataccgctaaaatgatcaaggagctggagacgcaggcgaaggaagaagcggacaagaaggcaaaggaatatgtcgtcaccgccatccagagatgtgcagcagatcatgtagcggaaactacaatttcggttgtacagcttccaagtgatgaaatgaaaggaaggatcatcggaagggaaggacgcaatatccgtaccctggagacgcttacgggcgtagagcttattatcgatgatactccggaagccgttgtcttgtcaggctttgacccgataaggagagaagtggcaagaatagcgcttgagaagctgattgttgacggacgtatacatccggcaagaattgaggagatggtagagaaagcgcagaaagaagtagagacaatgattcgtgaagaaggagaggcggcagctctcgaggtcggcgtacatggaattcatccggagcttatcaagcttttaggacggatgaaattcagaacaagttacggccagaatgcactgaagcattctattgaggtatcacagctgtcaggtcttctggcgggagagatcggtcttgacgtcagagtggcgaaaagagcaggtcttctgcacgatgtcggaaaatctattgatcatgatgtggaaggctcacatattcagatcggtgtggatctctgtagaaaatacaaagaatctgcgacggtcatcaatgcggtagaggcccatcacggggatgtagaaccggaaactttgatcgcatgtgttgtacaggcagcggataccatatctgcggccagaccgggtgcgagaagagaaacaattgaaacatatacaaacaggttaaaacaattagaagatatcaccaatcagtttaaaggtgttgagaaatcttttgcaattcaggcaggtagagagattcgtgtaatggtagttccagagcaggtatctgatgcagacatggtattgatggccagagatatagcgaagcagatagagtatgagcttgaatatcccggtcagatcaaagtcaatgtaatccgtgaatcacgtgttactgactatgccaagtagaagataaatgttgaagggaactgtcacgttgagagatcagcgggacagttctctttttttgttaaaaagcccctgaaacatacgtgtacaatatacctgaaaggtgtataatgagttaaatcatataagccggctgttattcttcagccggcttatatgctatgagtacgatgtctttttctgtctgtagtctcagcttttcctgaagttcgtttatttctttaatacagtcagatgagatgtctgctatctgatattctttctccacagtgctcacctccccagttagtatttggagaacagaagaaaacatacggaagatgtacttaaattatttgccgtcaccgctccccattctttttgacacgttttttattttaagaatgaaatcctgcatgtctgaacatcctttctttatacaaataaattcctgttacaatgagaataccggcatgcacatataacgtctctgctgcaccctttgtttagcgttaaaaaagtaacgtttgacattctatactgtaataattataattacagtatccggagacatacatttatactgtctgtcaaagattgtgaaaagaggactgtatatataagcggtgttctgccggaatttactcgtgtatggaggctgtgatggaagaagacagaaaaaagatatgtagtaatacggatgtgataaagaaggagagactgtggcaggaagtctatgccggaacgtatacttccgagaaaagtaaaggcgtgtaccgctttttgttcaacagagaaaacgcagagatgacagaaccggaacttttttatgaggccggcaatgcaaagtgggtgtctctgtcgggagatatgcttgcatttcctgtggagaaggaaggccgggcgggtacttgttttgtcagtctgaaggataaggcggcaaagcgcgtaggagagattctggaggagaaggatacgccgtgctttatcctgcaggacggtgagttcacgtacacagccaattatcatgacggcacggtcatggtataccatatgggaaaagatggacccgtcattgcaggaaggatagaaaacggcagagaagcgggatgccatcaggtcatagtacatggggcgtacatcatggtcccgtgcctcacacagcatgtgatacggctgtttgaccggagaaacggtttcagaactgccggtacgatacagtttccggacggaagcgggccgagacatggtgtatttgatcattcccattcaaagctgtatgtggtgagtgagtggagcaatgagctgtttatatttgatgtgcaggacaatacgtttctgctccgtcagcagctgtctgtgcttccggcaaagacggccggggatgagaataaacagaaggcctctgccgcggcagtgcgccttgcggaggatgaacgtttcctgtatatatcggtgcgcggactggatctgcttacagttgtggacgttagcggcaggaaggcggcggtgctggaacatgtgtccagcggcggtgaacatccgagagatttcgtcctgacgggagaaggagggcatcttcttgtggccaaccgcttttccggaggcatagtcagcatgaaaagaaacagagaaagcggcaggatcaccggtatccaaagccgtatcagcatgccggagggggtatctctggtcataagacaatagaaattttgatgaaggaggaatatatgatgcagaaaacagatataggcgtgatcggtctggcggttatgggcagaagccttgctcttaatatggcggaccatggatttaaagttggaggatataacagaagccgggaggtgacggatgcactggtgaaggagcacccgcatgataactttgtgccgttttatgatctggagacactcgttgcttcccaggaacggccgagacgtttcctcataatggtgaaagcgggaaagccggtggatatggtgatcgaccagctcgttttgcttctggacaaaggagatatgatactggacgggggcaattcattctttgaggatacgagaaggcgtgaaaagcggctgaaggcagagggcatatactattttggaaccggtgtgtcggggggagagcacggtgcgcgtttcggtccttccatcatgcctggaggggaggagtctgcctacagacatattgctcctgttctggaagctgttgccgcaaaagcgcagggggaaccgtgctgtgcctatatggggcctgacggcgccggacattatgtgaaaatggtgcacaatggaattgagtatgcggatatgcagcttatcgcggaggcgtatttactgctgaaatatgcaggaaattatacgaatgaagaacttgccgacctgtttgaagagtggaatgaaggggagctgaaaagctatctcatagagatcacagccaggattttccgggaggcggatgattatgccgagggagagctggtggaccacatactggacagcgccgggcagaaaggcaccggacggtggacgagtctggagtctctgaaacagggagtaaacgtttccatgatcacagccgcgtgcaacgccaggatcatgtcaaacagaattgcggaaagaaacgcggcgaaagcgctcataaaagaagctgcaaaacagcctgccgcggataagaaagcctttggcgagagcgtcaggaaagggctgtacacagcgaagatcgtggcatatgcccagggctttgacttgctgcgccacgcttcctccgaatatggatgggacctcaattatggcaggattgcttccatattccgggcggggtgtattattcaggcgcagtttctggatgacataacaaaagcatttgaaaacgactcggaactttcaaatctgatgctggactcttatttcctggagggtatcaacagcggaaaaggaagtcttcagagtattttgtgtcttggcattcaaaatggcattccgctgccggccatgagccaggcggaagcttatatcgatgcgttcagaggaacgccgacgggcgctaatcttattcaggcgcagagagactgcttcggggcgcacacatatgaacggacagaccgagaaggcgtattccatcacgactgggggcaggacaatgaataaagaacagacttttaccatattcggaggtaccggtgatctgactttccgtaagctgatcccggcgctttataatatggcggcggcaggcaatgagcagctcaatggccggatcgtcgtgatcgggaggagagattacacgagtgaatcttaccggaagctggcgggagagtgggtggaaaagttcgcgcgccttacctaccgtgaagagatatacgataaactggcggagcgtatcgtgtattaccgcatggattttaccgacgaggatgagtatagaggactcgatgcattttacacagagatcggcgccagggcccatatcttttactttgcggttgcgccccgctttttcggaacgatcgtgcaggggcttaaaagtgtacacggagccgggagcggcaaggtggttatcgagaaaccgttcggagagaaccttctggccgcagaagaacttaacgtgaggatggaagcgtttttcgggccggaccacatataccgcatcgaccattatcttggcaaagagatggtcaggaatatacagacgatccggtttgccaatcctatcttcagcaatatatgggatgcgggccatatagagtgcattcagatctctgcgcttgaggaagtcggcgttgagacgcggggcggatattacgaccacagcggcgcgctgaaggatatgatgcagaaccatctgttccagatactgacgatcgttgccatggaacggcccgaggggccgggggtggaagagatgcaccgggaacagatgaaggtcctgaaggcactttgcatgccggaagcagctgccggcagtatggtgctcggacagtacggcggataccggaaggagcaggcggtggatgagaattctgcgaccgagacttatgcggcgctgcgcctttttgtggagaatgacaggtgggaaggcatgccgttctatatccgaacaggaaagaagctgagaaagcgggagatgcaggtggcagttgtatttaagagtccggtccccggcgttccgcagaacattcttaatatcaagatacagccgacggaaggcgtatatcttcagttcaatataaaaaggccgggtgaggcggatgagattatacaggcgaagatggatttctgccagagctgctcttatatcaaccagatgaatacgccggaggcatatgagaggctgctcggcgcatgtatccgaggggaacgctcctggttttcacagtgggaccagatcgagacgagctggaagtacgtggatgccatacgggagcagtatgtaagcgggagtcttccggtgtatagttatgaaccagggactgcagggccagaagaagcggatgagatgcttagacagcacggccatgcctggttcgactgaccggcgggaacagccgtataagatgagatgcggcaatggatatgcaggaatgaatgcttgaaattgcaaaaatagtatatcaacgccgtaataacgttgaagtgatcgggaaaaagaatatattggaaaataatcttgcaaatagaaacatcttatactataatgaataactagaatgtttaataaaatatgaaaagataggatggatggaacaatggcgttaacattatcagaaaaggcggctagagtaaagccgtcatctacacttgcgatcacggcaaaagcaaaggcgatgaaggcagaagggattgatgtagtaggatttggagctggggaaccggattttaatacaccggataatattaatgaggctgcgatacgtgccatccggtccggatttacaaaatataccccggcgtccggtactgtggagctcaaaaaagccatcagcagcaaattccgggagtttaacggccttgattatgcgccggatcagattgtcgtcagcaacggcggaaagcattctctcacgaatatattccaggcgatcacaaatccgggtgatgaggtgatcatacctgctccgtactggctgacctacccggagatcgtcaaattatgcgacagcgtgccggtcgttatttacggtacaaaagagacgggctacaaagtgacggcaaagcagatcgaggacgcggtcacagtcaggacaaaggctttgatcttaaatacgccgagcaatccgacgggcatggtatatacggaagaagaactgcgagcgatcgcggacgtggctgtcagaaacgatttttatgtcgttgcggatgagatgtatgaatatcttatctacggggagaagaagcatgtgagcatcgcgtctctcggagaggagatctacaggaggacgatcacatgcagcggtctgtcgaagagctattccatgacgggatggaggatcggctacaccggttccagtgtcgagatcgcgaagcttatggggagtattcagagccatcagacgtccaacccgaactccatcgcacagaaagcggcgctggaggcgctttctggcccgcaggatgcagtggaggccatgagaaaagagtttgatgccagaagaaaatatatgtatgagcgtgtgcagaacatgcctttgttagagtgtctggagccggaaggtgcgttttatacatttgtggacttcacgaatgttctcgaaaagtcctataagggagtccgcatcggaacggcgtcgagggcggcggagattcttattgaagattacagcgtggctgtcgtgccgtgccaggattttggatttgacaatttcgtgcgcctgtcctatgctatttccatggaaggcatagagaagggattgaatcggatagaggattttgtgacttctctgtaggttatagaaaaagaaaaaagaaaaggcagggcgcgtcatgagtggtgaagtcagacggataaagagagagctcgtctataagggagcgatcctggaagtttataacgatacgatggaatttgctaatggaaacagagccggctgggattatatccatcacgtgggggcggcagcggtcgtgcctgtgcttgacgacggaaggatcctcatggtgagacagtaccgcaacgcgctggagcgggagacgctggagataccggccggaaagctggacgcggcaggagaagcaggcatcgagtgcagcagaagagagctggaggaagagacgggctacagggcgggacagctggagtggctcataacgatacggcctacagtcgcctactgtgacgagcggatcgaaatctatgtggcaagagacctgacaatgtctgtgcaggatctggatgagaacgagtatgtacttgtcaggccgtacagtctcgatgaattgaaaggaatgatctatgacggtacaatagaagattccaagaccgtcgcagcgctgctcgcctatgaagacaggtacctccggtgacggagaatgcccctgccagatgagggatgcagacatataataagaatatatcagaagacccggcatataatgaagtatcttgacaagaggaggagtatttgtgaggatacgggaaaacaaaaagttttttgttttattttgtatgctgggttttttcattggaatcctgtatgccaatattgtgtcgaaagactacataacaagtatgggtatttttaatgatttctttttaaacgagtatgcccagacggatatcggcatggcggagtatgcgtggtatattatccgtatacggatgatgccggtcatactgctctttgcgctgggatgcaccagattcaggaaagggatcgttgtcgcgtttctgctttggacaggcttttcgtgcggtatgatcatgacgtcggctattatgaagatgggaattaaggggatcgtactgtgccttctggccatgacgccgcagtttgccttttatatcgcaggctatgtcgttctgctctggtacctgttttcctatccggaatccaagtggaaccttacgaagaccgtctgttttctgcttttgatcgcgcttggcattgtcctcgaatgttatgtcaatccggtgctgatgaaaatgttcctgaaaaccctttaaagagaaaggcgtgccatggtctggctgtataagctgtatgcgccgcgaaagccgaaggagaaaagaatggagataagagtaaaagaatacatagagtatcttgaggcgagaaaacatatttctgcgaacacaagatccgcgtatttaagagacctggagcggatgtacggatatctgagagagcacggaatcgaacagtttgaggatgcaacggcggcgacgctgaattcttttctgctctttcttgagaaaaatggccttggcggcgccaccattgccagaaatgcggcggtggtccgcgggttttaccagtatcttttccggaaaaaaatcatagaggacgacatcaccgagatgatggaggcgccgaaggtggagagaaaactgccaaagagcgcccggagagaagatatagacaaaatactgtccgttcccgaaggcggttcgccaaaggcgctgcgcgacagagccatgatagaagtgctgcgctgtacgggtattcttgtggaagaactgataaaactgcggacagaagacgttaagctggagctggggtatgtgcagtgtcattttccgggcaaccagaacgcatatccgctggacggaccgagcctcggggcgctccgccggtatctggaagaaggcaggggaaagctcatacgcagggaacaggacgaagtgctgttccctaacgtgagggggacctatatgagcagacagggattctggaaagtgatccgaagatactccgaagagacagatggggagcagaaaataacgcccagtatgatcagacatacgtagacggtataaggccggtgcttgcgcatcggcctttaaattgtcaaaatagtgcgggaattttcataggggtcagacccctttgccggcaggggtctgacccctatgcacctttctgcgaattgtcagataataatacagataaaagatgcagaacaggaagatgcagagctggcttgccagcagtccccacaggtagccgcggatcccgtacaccgggatgagcaggagcacgcttccgatgcggatgagcaggccgatggcgttgatgacaaaggagagcgtcgtcttcccgatcccgttgatgatgctgatgagcgtattgtccgtatagaggaacgggcatatccaggcgagagtgacgatgaaacttccggctgccgggctttggaacaggaaggtgccgatccagctaccggacaggaggaggagggcgcagcagccgcttccaagcagcacacagcaggagacgacttttttgatgatggcggacatctcccgctggtcatcgagcgcctgtatctccgccacggtcgggaggagcatggttgagatagaattggtgatggcggaaggaaacatgatgcacggaagcgccatgccggtcagcaccccgtatgtactgagcgcggccttgttcgtcatgccgtacgcctgaagcttaagcgggatggagatggcctccacgctctggaggacgttgagcagcacacggcttccggtgagcgggacggacagaaagagaagctcccttatatttctgccgaaggaggggaggccgggccggatcttccgcatggacatggatttaccggtgatggctctcagacagaagagcgaggatacgacttcgccggcaatgaggccggccacagcgatcgagataccgaaggtgatgccgttcttctggccgaatacgtagatcagatacacggacatgatcctggccacctgctcaatgagctgggatgtggccggcacgcccgtcatcttaaggccaaaataataaccgcatatacagctgtggaccgccgcgaaaggaaacgcgtacgacaggataacgagcagttcggcgcagcgctcatctttcaaaaatgcggaggagataaaccatgcgtatttctgcagcaaaagagtagtgatacaggaaattatcacagtaaatataatgcttgtgtacaataattcccttgcttccttttcctggccgagcgtagtgcgtttggcaacgcagcgggacagggctatttcaattccggcggaagtaagggaaaagcacagggcatagatggggaaaatgagctggtagagcccgacgccttcttcgccgaaagtatggctcagaaaaatccggtaaaaaaagcccataaatctggtggcaaaaccggtgagagtaaggatgaaagttcctttgataatggcacgttttctggacataattaactcctgtgggatatcgttataagatattcaggatatatgcttgacagaacagatttaaaagtgttattctacagaaagataaatcccagtaaaatactaggaattaaaaaagaaggtgatagcatgaagctttctacaaaaggcagatacggcctgcgggcgatcatcgacctggcaaggtatgcagagacagagcctgtctccataagcagcatagcggccaggcaggagatatcggaacggtatcttgaacaattggtcggccttatgaagaaggcaggacttgtaaaaagtatacgtggtgccggagggggatatgtgctggccagagatatgaaagacatatcggtcggagatgttctgcgcgcactggaaggaagtcttgagccggtaaagtgcgcggcgttctatgcagaagagggctgcatggcatcggacggctgcgtgacaaagtatgtctggcagaagatcaacgacaacatcaaccacacggtagatgagatcaaactggatgaattagttctggagagcaggcgcgtcaatcccgagggggaatgtgccaatccccagtgcaataaataaaagacaaaaaggaggaaaaaataatgggacgattcatatatttggacaatgctgcaacgacaaagacagcgccggaggttgtggaggcaatgcttccttatttcacggagaaatttgggaatccgtcaagtgtatacggctttgccgcggcaaataaagatgtcataacagcacagagagacatcatcgcgcgcgcgctcggcgcaaagagcagcgagatctattttacggccggagggtcagagtcagacaactgggcgctgaaagcgacggcagaagcatatgggaacaaagggaaacacattatcacgacaaagatcgaacaccatgccatcctgcatacaggggaatatcttgagagcaaaggctttgatgtgacataccttgatgtggacgaagacggtgtcgttaaactggaggaactgaaaaatgcgatccgtccggataccatcctcatatcggtaatgtatgccaacaacgagataggcacgatccagccgataaaagagatcggcgccatcgcccacgaacacgggatactgttccacacagatgctgtacaggcgttcggccaggtaccgatcaatgtggatgagtgtcatatcgatatgctcagcgccagcggacacaaattaaacgggccgaaagggatcgggttcctgtatatccgtacaggagtcaagatccgttcgttcgtacacggcggcgcgcaggagagaaagcgccgggcgggaacagaaaatgttccgggcatcgtcggcctcggcacagcggcagaccgggccgtgaaaacaatggaagaacgcggcgccagggaaacagcgctgagagattacatgatagagcgggtgcagaaagagatcccgtactgcagactaaacggacacaagacggaccgtcttccgaacaatgccaacttcagcttccggtttattgagggagaatctcttctgatcatgctcgatatgaaaggtatctgcgcgtcaagcggttctgcctgtacctcaggctcacttgatccttctcatgttctgcttgccatcgggctgccccatgagatcgcgcacggttcgctgaggcttacactgagcgatgagacgacaaaagaagatattgattacgtgatagataatctaaaagaaattgtggaacatctcagaaagatgtcgccgctgtatgaagactttgtaaagaaaaatagttaagacagacacagaaggaggaaaacagatatgtattcagagaaagtaatggaccatttccagaacccgcgcaatgtaggtgagatagatgacgccagcggcgtcggaacagtaggaaacgcaaaatgcggagatatcatgaggatgtatcttgacatagatgaggaccatattatccgcgatgtgaaatttaagacttttggctgcggcgcagccgttgcgacgagcagtatggcgacagagcttgtaaaaggcaggacgatagaagaggcgcttaaggtgacgaacaaagctgttatggaggcgcttgacggtcttccgccggtaaaagtacactgttctcttctggccgaggaggcgatccacgccgcgctttgggactacgcagagaaaaacggcatcaaaatagaagggctggaaaaaccgaagtcagatatccatgaggatgaagaagaggaagaagaagcatattaggcgaaggtaacaggatggaaaagaaaaaagttgtcgttgggatgtccggcggagttgattcctctgtggcggcttacttgttgaaagaacagggctatgacgtcatcggcgtcacgatgcagatatggcaggaagaagagcgcgcggtgcaggaagaaaacggaggctgctgcggtctgagcgctgtggatgacgccagaagagtggcggctcagctcggtatcccgtactatgtgatgaatttcaggcaggaatttaaagaacatgtcattgattattttgtggatgaatatacgcatgggcgtacgccgaatccgtgcattgcctgtaaccggtatgtaaagtgggagtctcttttaaagaggagtatggatataggagctgattatatagctaccggccattacgcaaggatcgaacagcttccgaacgaaagatacgcactgaaagtctctgccacagacacgaaggatcagacatacgcgctctataatctgacgcaggagcagcttaggcgcaccctcatgcccgtcggcatgtacgaaaaagaagagatacgcaggatcgccggaagtcttggccttgaggtggcaaataagccggacagccaggatatctgctttgtcccggacggggattatgcctcttatattgaaagagaggccggggttaaaagccttccgggaaactttgtcacttctgacggtaccgttgtcggaacgcataagggtatcgtgcattatacggtgggacagagaaaggggctggggctgtctctcggacacccggtatttgtccttgacatcagacccgggacgaacgagatcgtagtggggagcaatgaagagtccatgtccagatatgtgagggccgataacgtaaacttcatgtctgtcggcggcctgccggagaaaaagagagtgtgggccaagatccgctataaccacagaggcgcatggtgtacggcagaaaaaacgggaccggatgagatcgtctgtacatttgatgagccgcagcgggccgccacaccgggacaggcagtcgttctttatgacggagagtatgttctcggcggcggaacaattataggagatgagtagaaagatgatgagagcagatgtgcatatgcatacgtcgttttcacacgattcaaaagccgcgcctgaggagatgatcctcggcgccatagacaaaggccttgagatgatatgttttaccgaccattatgataaggatgatatggaatggggggaagagagcatcttcgacccggaagaatactttaaagtgctgctccccctaaaggagaagtacagcggcaggatggacatacgtattggggtggagcttggcctgcgcccgtatcttggagattattaccgcaagttcacggctgcctatccgtttgatttcgtgatagggtccgtacacagcgttgaatccaccgacccggccacagggaaactctttgagggaagaacagatgaagaggcataccgtaccgcttttgaggaaatactgacagatatccgttcctataaagactatgatgtgcttggtcatctcgattacgtggtgcgctatggcgcgggcagagagaaggcatacacataccgcacgtttgccgatgtcattgatgagatactcaggcagctgataaccgacggcaaggggatggaactgaacactgcaggacttaaatacggacttccgttcgcacacccccatccggatgtactgaagcgttaccgggaactgggcggagagatgatcaccgtcggggcggacggacactgcccggaacatatcgcgtacggctttgacaaggcggaagagatcctgagatcatgcggctttaaatattatacagaattttccggcaggaagcctgtttttaagcaacttccataaaaatggtaaaagcccttgaatttttgtatcaaatttagtacaattatagacggttgatgattctttaacgatgttaagggatttcaagaataaaggctgtgtaacagttaataaacaaactttaggaggaattaatcatggcagtaaaagtagcgattaatggattcgggcgtattggacgtcttgcattcagacagatgttcggagcagaagggtatgaagtagtggcgatcaacgacttgacatctccaaaaatgttagctcacttgttgaaatatgactcttcacagggaaaatatgctttggctgacaaagtagaatctacagatgactctatcatcgtagacggcaaagagatcaagatctacgccaaagcaaatgctgaagaacttccatggggagagatcggcgttgacgttgtccttgaatgtacaggattctatacatcaaaagaaaaagcatctgcgcatgtgaaagcaggagcaagaaaagttgttatctcagcaccggctggaaacgacctgccaactatcgtatataatgtaaaccacgaaacactgaaaccggaagacacagtgatctctgctgcttcctgtacaacaaactgtcttgcgccaatggctcaggcattgaacgatcttgcaaagatcaagtctggtatcatgtgcacgatccacgcttacacaggtgatcagatgacacttgacggacctcagaaaaagggcgatctgagaagatcacgtgcagctgccgtaaatatcgttcctaacagcacaggcgccgctaaagcgatcggtctcgttattcctgaactgaacggcaagctgatcggatctgcacagcgtgttcctactccgacaggttctacaacaatactgacagcagttgtggacggaacagtgacagttgacgaagtaaatgcagctatgaaagcagcagctacagaatccttcggatataacacagatgagatcgtatccagcgatgtgatcggtatgagatatggttctctgtttgatgctactcagacaatggtactgcctttagataacggaactacagaagtacaggtcgtatcctggtatgacaatgaaaactcctacacaagccagatggtaagaacgatcaaatacttctctgaattagcataaatctgctttaagactcacaaaggggtccggtctatattgggccggatcctttttacagccctgctgcggcaaaacgctgcttaaggactggccgcagccggttttgccgcctgtgggtatctacttctaatgcaatataaaaaacggaggccaacatatgcttaataaaaaatcagtggatgatatcaatgtaaaagggaaaaaagtacttgtaagatgtgattttaatgtgccgcttatcgacgggaagataacagatgagaaccgtctcgaagccgcgcttccgacgatcaagaagctggccgcggacggcggcagagtgattctctgttcccatctgggcaagccaaagggagaggctgtgccttcactttctcttgcgccggttgcggcgcgtcttagcgaactgctcggacaggaagtaaaatttgcggcagatccggaagtggtagggccaaatgcaaaagctgccgtttcagccatgaaagacggagagataatcctgcttgaaaatacgagataccgggcagaggagacgaagaacggagaggcattttccaaagatctggcttccctgtgcgacgtgttcgtcaatgatgcgttcggcactgcacacagagcgcactgctctaatgtaggggttacccagttcgttgacacggcggtcgtaggttatctgatgcagaaggagatcgacttcctcggcaatgcggtgaataatccggaaaggccttttgtcgccattcttggaggggcaaaagtgtcaagtaaaatatctgtgatcgaaaatctgctggataaggttgatacattgatcatcggcggcggaatgtcttacacattcagcaaagcacagggcggaaatgtaggaaagtctctgctggaagaagattactgtgattatgctctggatatgctcaagaaagcgaaagagaaaggtgttaagctgctccttcctgtagataccgttatcgcagatgatttttccaacgacgcaaattccagagttgtaaaagcgggagagattccggcagactgggaaggccttgatataggacctgagaccgcagctatgttctcagaggcggtaaaagacgcgaaaacagttgtctggaacggaccgatgggatgctttgagatgccgaactttgcaacaggcacggaggcggtcgcaaaagcgctcgcagagacggacgccacgacgatcatcggaggcggagattccgcagcggccgtaaaccagcttggatacggcgacaagatgtcgcatatatccacaggcggaggcgcttcacttgagttcctggaaggaaaagaactgccgggagtagcagcggcaaacgacaagtaaaaatcaggcagatatgtcaaccgcgctgcacataaaatataaaagagaattaggagagtaggaagatggcaagaagaaaaattatagctggcaactggaagatgaataaaacaccgagcgaggcggtcgctctcgttgaagaattaaagccgctcgtggcaaacgacgaggcagatgtcgtattctgcgttcccgcaatagatatcattccagttgtggaggcatgcaagggcaccaatatccaggtgggagctgagaatatgtattatgaggagagcggggcttacaccggagagatctcacctgcaatgctcacagacgcaggcgtagcatatgtggttctcggccactctgagagaagagaatattttgccgagacgagcgagactgtaaataaaaagatgctgaaggcgtttgagcacggtatcacaccaatcatgtgctgcggcgagacgctcgagcagagagaacagggcgtgactatggacttcatccgccagcaggtcaaggttggttttatgggagtcacagcagatcaggcgaagacggcagttatagcctatgagcctatctgggcgatcggcacaggaaagactgccacaacagagcaggcacaggaagtgtgcgcgggcatccgtgcatgtatcgccgagatctatgatgaagctacggcggaggcggtccgcattcagtacggcggctctgttaacgcggctacggcgccggaattatttgcccaggcagatatcgacggcggtcttgtaggcggggcttccctcaaggcagatttcggaaaaatcgtaaattataaataagcagtaccgggagccgcaggaagcagattcctgtggcttttccttgtgaaattaaaatctggaaaaaataaatggcaggagaggaatatatgagcaaaaaaccaacagtattgatgattcttgacggatacggattaaatgacagcaggaagggaaatgccgttgcagagggcaggacacctgttatggataagctgatggcagaatgcccgttcgtgaaaggatatgccagtggaatggcagtcgggcttccggacggacagatgggaaactctgaggtcggccatctcaatatgggggcgggccggatcgtataccaggacctcacaaagatcacaaaggcaattcaggacggggatttctttgagaataaagcactgctggctgcgtgtgagaatgtgaagaaaaacggcacatctctccatttgatggggcttgtctccgacggaggagtccacagccacaatgagcatatctacggacttcttaggctggcaaagatgcagggcattgaaaaagtatatgtgcactgttttctggacggccgtgacactccgcctgcatccgggaaagaatatgtggaagaactcgtcttaaggatgaaggagatcggtgtcggcgaagtcgccaccgttatgggacgttattatgccatggacagggataaccgctgggagcgtgtggagaaggcataccgcgcgatggccgagggaataggagaaacggcgtcaggagggccggaaggcattcaggcatcctacgacaaagacaagacagatgaattcgttctgcctgcggtcgtgatgaaagacggcgcgcctgtagctacagtgaaggacggagactctgttatattctttaacttccgccccgaccgcgcaagagagataacgagaaccttctgtgacgataagtttgaagggtttgacagaggagacaggatcaagacgacctttgtgtgctttacagaatatgatgtgacgatcggcaataagctcgtcgcttttgtgaaagatgagatcacgaacacattcggcgaatttctggcagcaagcggaaagacgcaggcgcgtatcgcagagacggagaagtacgcgcatgtcacatttttcttcaacggcggcgtggaagagccaaacaaaggggaggacagaatcctcgtaaagtcaccgaaggtggcgacctatgatctgaaaccggagatgagtgcatatgaagtatgcggtaagctcgtcgatgccataaagtccgataaatatgacgtcatcatcatcaactttgccaatccggacatggtcggccatacaggtgtggaagcggcagcgatcaaggcgatcgaagccatcgacgagtgtgttggaatggcagtggaagcactgaaggaagtggacggacagatgtttatctgcgcggaccacggcaatgcggaacagcttatcgatgatgagactggagagccgtttacagcgcatacgacaaacccggttccgttcattctcgtgaacgccgatccggcctttaaactgagagaaggaggctgccttgcagatattgcccccacgctcatagagatgatgggaatggtgcagccgaaagagatgacgggaaagtcattgctcatcagagaataactttcatatgccgatcgcataaaagatggggctgtaaaaaagtccaaaggaagaatcgccagaaccggtatttgccggaactggcgattcttcctttaggagagttttacaccctgttttttaatttctgccgtgatccggctattacgcctccatattcttattggcggtcgacagcatcagtttgatgcggttcagctggttgacctcgctggcgccggggtcaaagtcaatggcgactacattggacttcggataccgtctgcgcagctcctttatgacacctttgcccacaacgtgattcggcaggcaggcaaagggctgtgtacatacaatgttggatgcgccgctgtggatcagttccagcatctcaccggtgaggaaccatccctcccctgtctggttgccgagggagacgatctcagatgccatgcgtccaaggtcctcaatatgcgcgggcgggtcaaaatgtctgctggctctgaaggcctctgtcgccggggcgcggaaccactccagcactttgatgccgagattgcccattgtcgctttggacttcttaaatccaagatgtgataccttgaaattctggttgtagaagcagtagagcaaaaagtcgagcagatccggtaccacggcctcagcgccttcattttccagaagatccacaagatggttattggcagccggaaggaacttcacaagtatctcaccgacgacaccgactctcggcttcttcacatcaagtaattctatgttgttgtcaaaatcttcaatgatctccctgcacagctttttgaacctgcgtctggaaggatatccggccgatacaaattcagcacacacctttacccatttcctgtgcatagcgtttacggaaccgggaaccgcctcatacgggcgcagtctgtatacgcatttcataaagatatctccaaatatggcagcgtatacgccgcgcagcgcgagggcgggagtgatcttaaatcccgggtttccttccagcccgcttaagttgatggaaatgaccggaatatgggaatatccggctttcttaagagccctgcggataaagccgatgtaattggaggcacggcacccgcctccggtctggctgatgatgaccgccaacttgtcggtgtcatatttcccggaaaggatcgcttccatgatctgtccgacgaccataagagaaggataacaagcatcgttattgacatacttcagtccgacatctactgcctgtttgttgtcgttgggcagtacgtctaccttatatccggaagcgcggaatgccggttcaagcagctcaaagtgcataggtgacatctgagggcagaggatcgtataatcgctgcgcatctcttttgtgaacggcaccttttcgatcgccgaggaagtgacggtgcgcttcgtgcttcgctgttctctgacgcggatggcggcaagaagtgaacgtacacggatccttgcggctccgaggttatttacctcatcgatcttaagagaagtgtatattttatcagaatccgtcagtatatcggccacctggtcggttgtgacggcgtccagcccgcagccgaaggaattcagctgtatgagatccagattgtctactgttttcacatagttggccgccgcgtacagtcttgaatgatacatccactggtccatgacattgagcggacgctccaccgggtttaagtgggagatggcatcttcggtgagcacggcgatattataagaattaatgagttccggcagaccgtggttgacttccgggtcaatgtggtaggggcgtcccgccaggacgatgccccggtttccggtctccttcaggaacttgagcgtttcctcacctttacgtctcatatcatccctgcatgcctccagttcctgccacgcttcatggacggccgctttgatatcgtcctccaggatagagaactttttggccagttcctctgtcaggcggtgagtcagggcagcttcatcagcaaaagatataaatggatgtatgaaatctacttccccgttggcaatggcatctatattgttcttgatgttttccggataggatgtaacgatcggacagttatagtgattgttggcgtctgcgaactcattgcgctcataggggatggacgggtagaagatatgttcaatgccctcgtcgatgagccactgaatgtgtccgtgagccagtttggcagggtagcattcagattcgctcggaatggattcgatcccaagctcatatattttgcgggtggaggcaggcgtcagtacgaccctgaatccaagctttgtgaaaaaggtaaaccagaacggataattctcatacatgttcagtacgcggggaataccgatgataccgcggactgcctcttcatcgctgagcggagtgtagtcaaagtagcgtctcgtcttgtaatcaaacaggttcggcagcttgttttcgttcttttccttgccaagtccgcgttcgcagcggttgccggtgataaacttgcgtcccccgctgaaatgattgacagtaagccggcagttgtttgtacagcgtttacattttgtcatggttgtccggtattccagggcattgatgtcctcaatggagagcatggtcgttccttcgcagtctatgtaacgttcccgcgcgatcagggcagcgccgaaggcgcccatgattcctgcgatgtcaggacgtatggcgcggcagccggcaattttttcaaagcttctaaggaccgcattgttgtagaaggtaccgccctgaacgacaatgtggctgcctagttctgcggcgcttgagactttaatgactttaaacagagcgttcttgatgacagaataggcgagccccgcagagatatcggccacttcggccccctccttctgtgcctgctttacctttgaattcatgaatacggtgcaccgtgtgccgagatcgatcggatttctggcaaaaagggcctcatgcgcgaagtcttccaccgtatagttcaatgatttggcaaacgtctcaataaaagaaccgcagccggaagagcacgcttcattgagctgtacactgtccacggtctggttcttgatcttgatgcatttcatgtcctgtccgccgatgtcgaggatacagtctacatccggctcaaagaacgaggcggcataatagtgagagactgtttctacctcgccctcatccagcagaagggcagccttgatcaatgcttccccgtatccggtggagcaggaatgtacgatctcaacgtcttccggcagctggctgtaaatgtcttttatggcagagatagttgtcccgagcggatctccttcattgttgtggtaaaaagagtagagcagggtgccgtcttcgcctacaagggcggctttggtagttgtggaaccggcgtcgataccgaggaatgctttgcctttataagttgcaaggtccttgaccggaacctgatgcttttcatggcgttccttgaattccagatagtccgcctcactggaaaagagaggctccattcggtcgacttcaaactccatctttatcttgcctgcaaggcggttctgcatctcctggatcggtatgtccagatcctttttggaactgagtgccgagccgatggcggcaaaaaggtgcgaatgcttcggtgcgatcgtatgctcgtcatcgagcttcagcgtgcgcacaaacgcttccttaagctcagacaggaagtgaagcggaccgccaagaaaagctacgtggcctcgtatcggcttaccgcatgcgagaccgctgatcgtctggtttacaactgcctgaaagatggaggcagccaggtcttctttggaagccccttcattgataagaggctgtatgtcagattttgcaaatacgccgcagcgggcagctatggaatataaagctttgtaatctttcgcatactcattcagccccgaagcgtctgtctgcaggagggaagccatctggtcgatgaaagaacccgtacctcctgcgcagacaccgttcatacgctgctccacgttgccgtgctcaaaataaatgatcttagcgtcttctccgccgagctcgatagccacgtctgtctgcggggcgtagtcctgcagggaggttgatacggcgatgacctcctgcacgaaaggaactgcaaggtgcttggcaagcgtaagcccgccggaaccggtaatgaccggcgacacctggatcggtcccagtttatagaccgctcttccgagaagatcggagagggtttcctgaatattggcaaagtgtctttcatagtccgagaagacaacgtcgccggcttcgtccaaaacggcaatttttaccgtggttgagccgatatcaatacccaatgtatataattctttatgactcatgatatgtactccttatactggaaaaatatgtattacttcttattaaatgtagtaagctatttacaacttgtaacattatacgacaaaaaatgcgaaaagacaattcacaaaagtaatagatttataaaattgctgttaaacttcataggtataaattgacaaacagactatgaaacggtagaatgtctacagtgtctaacatatgaaagcagggagtaaatatatgaattggttgaataaacttgagcggaaattcggcagatatgccattccgaatctgatgtattatattattatcttatatggggcaggcttcgtgctcaatcttctgaatcctcagttttattatcaatatctgagcttgaatgcggaggccattctgcacggacaagtgtggaggatcctgacgtttatcattcagccgccttcaaaaagcattatatttgttgtgtttgcgctttacctgtattatctgatcggcaggcagcttgagatggcgtggggggcgttccgttttaacctgtatttttttgcggggatgctgttccatgtgatcgccgcgattctggcatacttactgacaggattatccctgcctcttgacgtatggtatctgaatctgtctctgttttttgcattcgccgcgctgtatccggacgtacagtttctgctgttcttcattataccggtgaaggtaaagtggctggcatggctggacggggcttactttatctgggcggttgtccaggcgttcctgccgtcttacggcggaggtgtttacggcatttattataaggcaaatgcactcgccgcggcagtttctcttctcaattttgtcatctttttcctcggttcgcggaacatgaagccttattctccgaagcaggtgaaaaggaagaaagaattttataaaaaagtacagcaggcgagaaggccggataacgtatatgaaaacggagcgagacacaaatgtgcggtatgcggcaggacagagctcgacgacccgaatctggagttcagatactgttccaaatgcagcggcaattacgaatactgccaggatcatctgtttacgcacacacatgtaaagtaatagtgaaagagagaatatagagaggtatgactatgaagaaaacgaaaataatctgtactatgggaccaaatacgaatgatgcaggtctgatgagaaggcttgttcaaaacggcatggacattgcgcgttttaacttttcccacggcgaccacgaagagcagaagtccagaatggatatgctcaagaagatccgggaagaagagaaaaaacccatcgccattctgcttgatacgaaaggtcccgagatacgtactggagtattaaaaggcggtaaaaaagtcactctgaatgccggcgataaattcgtactgacgacaaaagaaatagatggggacgcggcaggagtatccattacatatggggggcttgtggaggacgtccaggtcggaaagaaaattctcatcgatgacggtctcatagagctgaccgtgcgcgaaaagacagatacggatatcatctgtacggtagacaacggcggcgagcttggagaacgcaaaggggtcaatgtgccgaatgtgccgatacgtcttccggccattacgcaaaaggataaagaggatattaaattcggcgttgagcaggaagtggactttatcgcggcgtcatttgtaagaaatgcggaatgcatcctggagatcagggcatggctcaaagagtgcggttctccgtatatcccgatcatcgccaagatcgaaaatgccgaggggatcaaaaatattgaagagatcatacggtgtgcggacggtgttatggtagcccgcggcgatctcggtgtggagataccggctgaggaagtaccttatctgcagaagatgcttatacagaaatgcaatgattattataaacctgtcatcaccgccacgcagatgctggactccatgatccgcaacccgcgcccgacaagagcggaggtgaccgacgttgcgaacgcggtatatgacggcaccgatgccgtgatgctctccggcgagacggcgcaggggaaatatccgctggaagcgctccagatgatggtgcacattgtggagaatacggaggagcaccttgactacgaggtgattctggagaaggcggcggaacataagagaaagggcatttccagcgccatcggttacgcgtcggtagcggcggcggacaatctcggtgcaaaatgtatcgtgactccgtctgtttccggcgctacggcgagagtagtatcaaagttcaagccaaaggcagacattataggtgtgaccccgaatgagtcgacactgagaagaatgcagatatactggggtgtgagaccgtataaatccattgagttcaatacgacggaggatatcctgacaggcgccatcgaactgataagcgccaagcaggtggtagagccgggagacattattgtgctgacggcaggaataccgtctccaaatataaagcggtcaaaagaaggcgtcagcaatatgatgcgaatagcggttatagattagttagagggcacaggtatttctgtgccctttttaatgttaaggcaaggatccagggtgaactttgagaaaaagtggaggccgaatatgtacgattataaagaaaaaaacaaagacagggcggaaagaaaaaggcatttaaatgtaaattcaggtacatcagagtcggggaaaacgatacaaagacatacagcagtgccgggcacagacttcaggaagtcggccccagggcccgatgggaagcggcatataatggtaaagaagaatgaagcagcaaccatctatattcggaacgactgcccctttattcctgctgagttccgtcctcttggcatatctgtgatgggaagtattatcgatccggaggacagccggtcaatttataatgtttttgtgcaggggcctgtgccggagtctgatatccgaatacgtcatttgaataacatggtaaaaaaggcgggaggacgggaacgtacgaatgaggaacaagtgcatgcggcagaacggcttgagcttcagaagagttatcttaccgaggcgattcgtgcggccgatactttagatttaatgatcaatgatctgataagcagcgacactaaaacacaagctccagtggtgtaccaggatatagacacaattttgaaaggactgaccgctcagcatatgtcagctgaccctgaacagcgcattaccgcagctgccctgggaatggacatactgtatgcggtttatgccatgaaagaaattctggagaaaatatggccgaaattagtacagtatgtaaagcctgaagttgggcctccttacgaaattctttcacagaggcaaaaaaatgattgcaggctgatcatggatgtggtccgcagtgaattggaactgcgcatgtcgcaggtgacaatggaatgtctgtatatcccgtctaagcccgagttcccgacaggatgcgccatgtcagccaataagcggagcatattgctcagcggcggcgccgacatttgtgaagcggcggatttcagcataagccctgggagcccgctgaatgaggaaattggatggaaagggcacctggctacgaggatcaatgtggatcctattacgagagactctttatttattgaagatgctgtcggtaaatcactgatagataatgaagcttcaaatgcgcattggtatgcgaacctatatgggatacaggaggacagggtaaaaacggagccggacgcaaacattaagtcacttatgcagccaaaaccgcagtgtatcttcaatagactgagttatgagttcagatcaaattactttagaatgacaggaatcaggccaggagagtcatggaaaatagattacttaaggagtagagaagggcagaagagaaaaaagctgggcacactttatatacatattacatctgatttcatgtttggttatgactttaataatacatcttcgggtgagagtttttttgcatttgatttttccgattttctgcgggaaacagcggattctgtgatcgacggactgatactgcagcaacaggcagttgcggcataccgccgggagcaggggagttttgggataggaaagcggcactctgatttaaagacacagatgaatagacagtatattttgaacacaaagacagaagattttgctgattgctcagaaatatatctgtttgggctggaggatatcagtctgccggagccggttatggagccggaggatatctgttaataagatttttatatggaatcttgtttttatataaattttaatattgacagaaaaaatggaatgtactatagtgttcctatggagaactactagaagaaagtgaaggacaaaatgatggaaagtacgacatttgtggagcgtctgctggagtttggtcttacgaggcaggaggccgccatctaccagtgccttttgggcgaaggcaagacgacagggtatgaggtggccaagttaataggaatttccagatccaatgcatataattcgctggccagccttacggagaaaggcggggcgtatctggtggaagaaggcactacgagaaagtacgtgccggtgccgctcagagagttctgtaaaaaccatctgaggatgcttgaggaatccagaaactggctcatatcccatctgcccacggaaaagagcagtgcggaaggatatataacgatagaaggagcccgccatatacttgataagatgaagaacctgcttgcccaggcagagaacagagtgtacatatcatgtacgagaaattatctgctcctctttgtgcgtgaactggaggaccttgtcgctgcccgcaggaaggtagtgatcatcacggaccgtccggtccatcttgccaatgtgaaggtatatctcggagaggacagagggatgcagataggacttatcacagattcaaagtatgtactcacaggagaatatggggaagggagcctgaacacgtgcctgtattccggtcagaagaattttgtggagctgtacaagagggctctgggaaatgagataaaattacttgcgttacgggaggagaacagagaatcatgaaaaaagaaacatttgtgacaaaagagcagttggacgagatcatcaaagactatccgacgccgtttcatttatatgatgagaaaggaatacgcaggaatatgcaggcgctgcgggatgcgttttcatggaataaaggatacaaagaatattttgccgtaaaggcgactccaaatccgtaccttatcgatatactcagagagtatggctgcggctgcgactgttcctcttatacggaacttatgctgtctgaggcggtaggagcgacaggggacgacatcatgttttcctcaaatgatacaccggcggaagagttcatatacgcggagaagctgggggcgatcatcaacctggatgatattacacatatagagtttctggaggagacgatcggttatatcccgaagacgatcagctgccgttataatccgggaggactgtttaagatcagtaatgacatcatggataatccgggcgactccaaatacggtatgacgacagagcagctgtttgaagcgtttaagatattaaagtccaaaggggccgaggaatttggaattcatgcatttcttgccagcaacacggtgacgaacgaatattatccgatgcttgccaagatattatttgaagaagccgtccggcttcagaaggagacaggcgtacacattaagttcatcaacctttcgggaggaatcggcatcccctacacgccggatcaggaaccgaatgatataaggatcatcggggacggtgtgcggcgcgtatatgaagaagtcctcgtcccggcaggaatgggagatgtggagatatatacagaactcggacgttttatgctcggtccatatggatgtcttgtgacagaggcgatccacgaaaagcacacacacaaagagtacatcggtgtggatgcctgcgctgtgaatctcatgcgcccggcaatgtacggagcatatcaccatgtaactgtgatgggcagggaggactgcccatgtgaccacaagtatgatattgtcggttccctctgcgagaataatgataaatttgcgatcgaccgtatgctccccaaagttgagatgggtgacattctcgtgatccacgatacgggggcccatggcttctccatggggtacaattataacggcaaactgaaatcagcggaacttctattgaaagaagacgggagcgcgcagcttataagacgcgcagagacaccggccgattactttgcaacctttgactgctttgatatcggtaagaaactgctgaatatgagatgaaaattgctttttccggggtgctgatatataatggtatcattaatactttatgtaggagggtaacaatgatgaaaactaagaaaaagagcctgcttgcgcttttgctcgtacttgttatggtattactgagcggctgccagggcatgtccaaggaagatgcaaaggcgtacgcccagtcggtgctggacgcccaatacaaaggtgagttcaaagcttacatggagcagacggataccacggagaaggaagcgaaagaaatgtatgagggcaatctggacgagctccttgcagacgccgggattgatgagtctactttatctgaggacatggtcaaaaattacagagatcttttccttgaggtcggcaagcaggtgaattataagcttggcgacgccaaggaagcggatgatgattcctttactgtcgatgtaaagattaagccgctgaatgcgtttgaagggcttgacgatgaggtgctcagcgcagtgcaggcagaacttggcgatgcggacgagattccgagcgaagataagatcaatgagatggtctatggcaagatgtacgatattctttcagaaaaaatcgccaatccgacttacggagatgagcaggtcgtgactatccatgtgaagccggacaaagacggtgtttattatattccggacgatgatctgaccgcattggacaatgcatcacttttataaaaaaattattgtaattatcgaaacaatatgatacaataaatctcggcttggaaaagccgggatgagcggatgtggcggaatggcagacgcacaagactcaaaatcttgcgggggcgacctcgtgtgggttcaagtcccaccatccgcagttaacttaaaacaccggatactgtgataccaacggtttccggtgtttttttgtttgtcaggacctgcgccagacaaacaaaaatgggtgaaggaatctcatcccttcaccctacagccgcaggaaaaaccgttgctgaagccggtaaataaatcttgcagacgaagttgggcactttcgtctgacgcctatattctgcccgtgtgtatccaagaccaaaagctggatacttcatgtgcgctcctcccttttaatcctttgtgtttcttttccgatagagcagcaggagggcgcagcctgcaaggaccgccagcattgtcagcagccagggcagcagattcgccgtatcgccggtctgcgaagcggtggaaacattgatggcggccgtaccgctgggcggaaccgccaccgcgaagggagacaggctgaaaaatgagccttttgccgtgccgttctccaccttgacagtccggcgctccagcaccttgtccttgcagtggatcatcaacacttcccggccgttgtgtttgctgtccacgggaatctccacaatgaggccgccgatatatttgccggaggacaggccgatgtcgtgcagcacgatcagcccgcctccgttctgtctctcgcggatatcgccgcacgcctcgcaggagcctttttcatgcaggctgctctttttcactgccaggaccgcgtcgctggtgaaagagcctctcaccttcacgcgtgtaatggggtccgtgagcgtgcggtaggaataggttgggccgctgaccggcgtccacttggcgtacagggtcacatcgccattgatgggcgtcgtcttcgtatattgggtgcctgctccgttttgcccggtgaaccagccgccaaaggtattcccgctcttgaaaggggtgtcgggccactcgctgcctactgtctggttcggctggatgccgggcacctccttgactgtcgtgctgccgctgataaaggtgacggtataggcggcggcaggggtgttctccttgaccgtaaggggaatattcaccggtctgctggcgtaatcggtcttcttaccgccgcttaactgctcattgtacacctgcagggtatagagcgccggcggcaggtcagcggggatggaaagaagggcgctgccgctttctttttcggacagcttggcatagtgggtcacctttccgctttcgtccgccagcacacaggaaaccaccttgccgccgccgatttttgcgcctgcaaaggtaatctccaccgtatcgccggggcttaccgtcttttccccggcgtcggcgctcgtcaggctcagattaccggtatcattgtccaaaatcgtcaatttccaatcccctgccggcgcgcctgcgtctatgaagccgtcgcccacgttcacggatttgccgccctcggcggcggatgggaagagtacagaggacagcctcagcttgaaagcggggcgaatggcggtcggaaaattcgtgattttgctccaccccgtaccaccgtctgcgttcaccatatgggcgaagctaggcgaatcactctggggcgttctcaggccccattccgaattgtcggatgggctcgcataaatgcgcgcgcgcctgtccgcatacccactggggaaatacttctcattctcggcttcactgcgggagagcagccagaaaaagtcgccgtcattatccgctgtaaccgtttctgttgccaccccattttcatcatgtactctttgcttattgatagccgaaagctccgccgccgtgaagttgttcagaaattcccggctggtagatgtaaccgcagcatcaccgttcagccagctccggatatcggaggtcttataagtattattgccatctagtccttcataataagtgaagcttcgaaaagcgggaaaaaactccggcatcatcatcaattccccgttactgttgtcaagtacccgccacaggatttgatcggtatactcaccgtcccgatttccgtgatcgtctttatcggttctttgaacatctccgaagtagatatgctggtaggcggtggggatcgccacctccagcggaatatcctttggcgtgctggcgtaatcggtctgcttgtcgccgcctaattgctcgttgtatacccgcagggtatagctgcctgcagacaggccggcgggaatggtaatggaggcgctgccgctttctttgtcagacagcctggcgtagtgggtcacatttccgtcaccgtccagcaacacacaggaaactactttatcgccgccggttttcgcgccttcaaaggtaatcttcgccgcagcgccggggattaccttttccgtatcaacgtaggcacgcgtcagattcaggttatctgtatcactgtccaaaatcgtcaatttccagtcccccgccggtgtgcctgcgtctatgaaaccgtcgcccacattcacggatttgccgcctacggcggcggatgggaagagtacagaagacagcctcagcttgaaggcgggacgaacgccaaagtagttgctgatggattcgccgtcatcatcgacgccgccgtcaaggttgacatacgccgcattgttgtatttgctgccgccgggcgaacggagccaccaatttgcgttatttgaaggatcggcatatactggagccctcctgtccgcgttaccaccggagaaccacgcgcccttaacttcctcactggagggcagccagaaatggtcaccggaagcgtcgtacgtcacacccgccgcctcgccggttccgctgtcaaaagcccgctgcctgttaatagcagccaactccgcatccgtgaagttacccaaaaactcgcgggtgttgccggttacggttctgccggtcagccagcgccggatgtcggaatcccgatagttattattgctggcagcgggcgcgaatcttctccaggccggataatattccgccagcagtaccatttcactgctgctgttttccagcacccgccacaggatctggtcggaatattcgccgtctctgttaccgttcataacatcggttttcaccacgccgccaaaatagatgtgccggcaggcggaggtcgtgccactttccgtccccttcacactgccagggattccaataccagatgtcggtgcggcagcatcggcacttactgagcacaagtcgcagctatgggtgcaggggctgccggccactgcctttgaaaagccgcatccgctgtcatgcacatgggccgcctccaccgcgcatggcacggcgtcaggggtcttgtcccagccgcaagtgtcgtcgtgctggtgagcaaaggtgcagggcagtgcgtcttttgcctccgcgtagccacaggtgtcatcatgcgccgtgtgcgcagggcagtgcgagggcgagtcgtccgtgccttcggcagacacggcggccggcatgagcgggtacagcatcatcaccgccagcagcagtgcccaaaaacttttcctcatttttttcatatagattccccctttgtttgtacgtccaaaactgtttcaatctgccgcgtctctcacaggtaaaaagccgtccctgtggaagaactgccggcgtcctgctgtatcctgcttgatagataaaaatagtatagcacaccgaaatggaaactggaacaggggactgaataagaaaaaagttgacgcttttcctcgtgtgttatacgattgctgtgacgctgtatgtgcagatcaacggaggaatatcaagtaacggtggtgcaggagagcctggaaacaggctctctttttggtaaaaatgattttgtgacaatataggataaagcgtgaattaaaactataaagttttttttaattatgataaccttattgatcataggagggaaaaaccatgtattgttatgatcataaaaggaaagatacaagatgtaatacgggaatctgtatgaagaagatgaatgtaatccaacgcgtgggagcaccttatgcaggaattgcccggagtgggcattataacactccgcgggatgagtcacatgtaaaggggagtgcgttattagatgaccggataagaacttcagtcatacatccggaaaatttgtatgatcgtatttcatatagcgaagcagatgaagctatgttttacttcagtattttgtgcacggatcacgcaaattataatactttagtgcaggcagtaaacagggctcagcaagtcgcggatgcgcaccagggaaataaattctatcaaaggccattggaagatgcgagggcgcgtttgagggcgatagttaaccgctatttatctattcatgcatatgcagacgtagaatcaggcgtattgatacttgacactgcttatattagtgatcgccggccttacggagggataaatatggggaatctgactgcggctagagcagaagtatattaggtgttgtaaaatttacaattcacagatttcgcggtatttcttttattgaaaatatatgaaaaaaattagaagtgtccctctatgtccctgtgtgaactgttaagatgcatttacaaaaacataaggaggaacacaaaatggaagaaaacaagaattttataccggagatctatatcggtgaaaacggcaactggtttatcaacaactatgatacaggagtcaaagcaagaggggatgacggcattacgccgcacatcggggcgaacggcaactggtttctcggtgacactgacacaggtgtagcggccaccggccccaaaggagacaaaggtgatcccggtccggcaggccctcagggtctgacaggaactgcaggtccacagggggctacgggacctcagggactgacaggcccgcagggcccgacaggagccacaggcccgcagggcgctacaggtccaaaaggcgacaccggagccgccggtcctcaggggccaatcggggcggcaggacctaaaggtgatccgggagccgccggtccggcaggcccgaaaggcgataaaggagagcagggcccggcaggtccggtgcatatcgcaaacaacctgattacagatacagaaggatttgcgcttgacgcgcggcagggcagagagctgaatgaagagctgcaggccataagcggacggctgaacagtggcgtgcttaatatcggttcctatctgaagccgtctaatgacattctggcggaagcgttaaagacagagtatatgttttcgctcatttcatccggagaatttacaacgaatgtaccgaatacgtattacagatacacgctcggtattgtgctgaggcgcaagagtgaccagatcacggtcattttgtttgggcgtgacaatggattggccacgaacagatgggacggcacgagctggagcggctggaaaataaggtaattatttacatatattgagtttcggcgtctcacggtgtataattcttttatacttagaaaaggagtgttttcattgaagcgctgtattgcaatgactggaatagtttaagaggatacattaaaatgaaggaggacttcacatgactattccagagaaactcatatatccacgtacgggggacaaagcgaccatatatttgaagaatgtaatcagcagccccaatataatggttggagattacacaatgtacaatgattttgtccaggatccggttctgttcgagaagaacaacgttttataccactatccgatcaatcacgataagctcgtgatcggcaagttctgttccattgcgtgcggcgcccgcttcctttttaacagcgccaaccacagaatgaatgcattgtcaacgtatccgtttccgctcttttttgaggagtggggactggaccagaaagatgtcactgattcgtgggacaacaaaggcgatatcgttgtcggaaatgatgtgtggatcggatatgaagctgtcattctggcaggcgtcacgataggcgacggagcaatcatcgggacacgggcgcttgtgacgaaagatgtgccgccctacacggtagtaggaggcgtgcccgcaagaccgataaagaagcgcttttctgatgaaacagtctctgaactgctggaaatcaagtggtgggactggccgaaagagaagattgcagataatatagaggcaattaaatcaggcagcatagaaaagttgagatgaacagcatatgatgccggcagataatgtgacccggaccgtcttcccagtatggaagacggtccgggttattatgttgcggtattatgctgcggactgccaatttcggatacggtctgtaaaaaaatgtcggccggcacaggctttgaaaaatagtaaccttgtccaatgtcacaggagagcgattttaaaaaatcaagctgttgttttgtctcgatcccctcggctaccgttgcggcgcaaagatccttcgccagatgaatgacattgcggatgatcgcttcgcctcttgtcgtatctgactgggtggagaggaattccctgtccagcttgatctcatcaacatccagttccctcagtgtattgagggaagagtaaccgctcccgaaatcgtccatagatattttgaatcccatcccgtggagtctggcgatcacatccttgatctgctccaggttgttcatggcgactgtttccgtcacctccagaagaatgagagaagggtcgatctcgtagtggcggacgatctgttccagcttgttcaggtattttgcgtcgtaaaaaaagattctcgactggtttaccgccaacggtacggcggcataccccttatcccgccagccggccagacagcggcacgcttcttccagcatgtacatatccagtcttgtaatgaacccgttctgttcaaaaacagggatgaattcgtccggataaagcatcttcccgtcgccgggcatccagcgcacgagcgcctcggcactgtggagaacgccgtcttttaatgaaaacttcggctgaaggtacatgacaaattcgcggcgttccaacgcactccacattctgttttctatttctgttctcctggcggctttttcgtgcagggcactgtcatagaaagcgatggaatccatttcatttcccttcacgctctcaagcgcgagcagcgcgccgttcataacagtgtcaaaatctgcattcacgtcggacataccgttcttttctatgatcatcacgccgaagttgcagagaatgtggtagtcctgattgctgctcagccggaacttgtggatctgttcctggatcattttaagacgcgcgcttaacttttcccggctgcggtatttcaggagcatgccaaactggtccgcattatcgcggtagcacagttcgtgttcccggacattttctgcgagcactgcggcaatatggcgcaggagcatgttgccggcatcgtagccatagaattcattcacaaatttaaagccgttgatattcagaagcaccatggcataatggccggattcttttatgagccgctgcatttcaagaatgaatttattacggttgtcggagccggtgagaacatctgtgtaggcaagcctggctatttcctctctgctttttctgatcacacggtatatgtagataaagagaatggtgaacaaggcggtgatacagagcataatcacagcaaaaacggtcataagcgtgccgaaattttcgctcaggtagtcctgtggcacgacacagaacaagttccagtcgttgattccaagcggcacgatggtagtccagtatttttcatttttatactcaaaggtagagaaggagcttcggcctgctttggcagacttttgtatgtattccttatcctcgggcgaaacggtcccctcatcaaagatattgccgatattatcctggatcacggcatgggaagagcgtatgacgaaatcgccgttgctgcggataatgtgtgtatatgcgttccctccaaacagcttctgttcaatgatagaagagaaaccagatgcgcttgttgtggcagtcaaagcaccgatgacagcgccgtcctgatacacggggacactgtaacagttgatctttgcatctgaaaaccggtctgtcatcgtgtcagatacagaatcttcccctgtaagagctttgcggacaaaagattcgttgcccacattgacatcataatgctccgttccgtctgtgtcgataaaatatccggtcccgtccgccgttatataacccatccgcagaaagtcgttctgtctgctttccgatctgagatgggccagtatctgttcacggctgatgtcctcgcttttctcgataaaagtagacagcgcccgaagagtctggaggttgccgtcgattttaatgcctatcgcgttcttatattgggatacgacttcgttcagatactgcttcgcctcctgctcctgtgtatgcttaagccctctgtaggaaaaggtactgatgacagcaagtatgactgtgatgacaataccgagtatcccggcggcagttatctgtttgttcagatttttggaattcatttgtttcaacgtggattcccttcttttaagatgaatttttgtatcttatccggactgatatatagtggcgttatcactttttgaaccggaaggacttgcaatttaaattatataagattgttggaaatgtgacaagcagtttaggaaaaagaacaaaccggacagataaaagaaataaaaggatatgccttttaaaaaataagactttggtgtatagtattaaagtaggtttagcagattggagaactatatatggctgaaaagatagtattgatagacggacacagtatactgaacagggctttttacggacttcccgaccttaccaattcggaaggccttcatacaaatgccgtctatggatttctaaatattatgtttaaaatattagatgaagaggcgccggagtatcttacggttgcctttgatgtgcatgctcccacgttccgtcatgagatgtacgcggactataaggggacgagaaaaccgatggcggaagagctcagacagcaggtgccggtcatcaaagatgttctgaaggctatgggcatcaacattatagaacaggcgggcctcgaggcggatgatcttctcgggacgatatcaaagcgctgcggacggcaggggatggacgtgtctgtcataagcggcgaccgggatcttctgcagcttgcgacgaagcgcgtgaagatccgtatcccaaagacaaagcaggggagaacggagatagaagattactacgcggaggatgtgaaggagaggtatcaggtgactccggaggaatttattgatctgaaagcgctgatgggcgatgcctcagataatattccgggtgttccgagcatcggagagaagactgcgacaaaaatcataacagagtatcattctattgaaaatgcatatgagcatgtggaggagctgaagccgccgagagctgccaaagcgctgaaggaacattgggatatggcggttatgagcaggaagctggcaaagatcaatgtagacgcaggcgttgcattcaggctagacgaggcgaagcttggcaatgtatttacggaggaagcctacggatggttccagcggcttcaatttaagaatctgctcggcaggtttgatgtgaaagcgccgtcaaactcggtggaagactgcttcagggagatcacgtcgccggaggaagccgggaagatactggcagaggccaaaaaagcagcccttgcaggcgcggtcatctttaaggatacgaagaacacactgccgctgtttgcgggacaggcagatatcggcgggatcggcctgtgctatggggcagacaagatattctgtatccgtgcggacggtgatataacggcagaatatctgctccgcgaattgaaggaggtgtccggcagcgtccagacattttccatgtttgatataaaagagtccatgcagtattttactgtcgcagaaccttctgcctgctttgatgtgacgatcgcggcataccttctgaatccgctgaaaaacgattatacgtatgaggatgtggcgcgggagcagctcgggctcatgcttgaggataaagtagaagatcatgtgaaagtatgctatgaggcgtacacggcatatgcgtcggtggaaccgctcagacagaagcttaaagagacacagatggagcatctgttcacagatattgagatgccccttgtgttcacactttacgatatggaacaaaacggcgtcaggatcgagggcgaagcgctgaagttttacggggagcagctggggatcaagatcgaggagctggaaaaagagatctatgaggctgcaggggaagaattcaatattaattctccgaaacagctcggggtcatcttatttgacaagatggggctgaaaggcggcaagaagacgaagacaggttattctacggcggcggatgtacttgacaagctggctccggattatccggtcgtggcgcagatactggaataccggcagcttacaaagctcaagtccacttatgcggacggactgtcaaattatatcagcggggacggaaggatccacgggaaattcaaccagacgatcacagctacagggaggatcagcagtacagagccgaacctgcagaatatcccggtgcgcatggaacttggcagactgatccgcaaagtatttatcccggaggacggatatgtgtttatcgatgcggattattcccagatagagcttcgtgtgcttgcgcactgctccggcgatgaacagctcatcaatgcatataaagagcagaaggatattcaccgcatcaccgcctcccaggtgttccacgtcccgttcggggaagtgacggatcttcagaggaggaacgcgaaagcggtcaatttcggtattgtgtatggtatcagttcttttggcctgagtcaggatttgagtatcacgagaaaagaagcggccaaatatatcgacgattattttaagacttatcccggcatcaagctgtttcttgatgacacggtggcgcacgcaaaggagatggggtatgtagtgacgctttttggcaggcggcgccctgtgccggagctttcctcaagcaactttatgcagcgttctttcggagagcgggtagccatgaactctccgatacaggggacggcggcggatatcataaagatagcgatgataggcgtgaacaggcgtctcaaggagaagcatctgaaatcaagactcgtactgcaggtgcacgatgaactgctcatagaggcttataggccggagcttgaagaggtgaaggcgatcctgaaggatgagatggagcatgcggcatccctggaggtaccgcttgaaatagatatgcatacaggagataactggtacgaagcaaaataacagagggataaaaatatgaaaattataggcatcacaggcggcgtaggagcaggaaaaacacagatactggaatacttgaacgacaaatacggtgccaccgtatgtcaggccgacgaggtggcaaagaagctgcagaagaaaggaacagactgccaccgggctattgttgggcatttcggcgcggacattctggatccgaaaggagagctgaacagggaaaaactggcgcagatcatatttaccgataaggaagagcgtgccgttttgaatggaatcgtccatccggccgtaaaagaggagatacgaaagattataaagaaagaagagcggaagcatacgagcctttttctcctggaggcggccctgctcatagatgaccattacgagcagatctgcgatgagatatggtatgtctatgtggaggacgccatccggaaaaaacggctcatctatgcgagaggatacgacgcggaaaaagtggacgacattattgcgtcccagctcccaaaggatgtttttctgcgaaacagcgacagagtcatcgacaacagcggcatttttgaggagacaaagatacagctggatgagatgatccgaaatctctggtgatcaggacagatgatgtactaatatatataattgacaggagtgtatacatacatgagactatgcagcatagcaagcggaagcagcgggaactgtatctatgtgggagatgacaacacacatctgctcgtagatacaggaatcagtaaaaagaggatagaccagggattacatacactggggatcaaaggggaagagatcgagggcatcctcatcacccatgaacatattgaccacatacagggactcggcgtattcagcagaaaatacgaagtgcctatctatgccaccggcggaacgatcgaagggatcaaatgtacgaacagcatcggcagaatgccggaaggactgctccatgaaatagaggtggacgatgagttcctgctcggcagcctgaaaatacagccgtttgccatttcacatgatgcccggcagccgtccggttaccggatagaaggagacaataaagcggttgcggtcgccactgacctgggaaaatatgacgaatacacggtagagcatctgagagagcttgacgcagtgcttcttgaggcaaaccatgacattcacatgctggaggtaggcccttacccatatccgctgaaacgcagggttatgggggaaaagggacatctctcgaatgaattgtcaggcagacttctttgtgatatactacatgacaatctcaaatacgtaatgctcggacatctgagtaaggaaaacaattacgaagagctggcttacgagacggtcaagcttgaggtcagcctcggggacaatccttataaaggagaagatatcccggtgatggtggcaaaaagggatacagtatcagaaatcataacagtgtaggaagacaggaggaagaacatgaagaaatgtatcattacagtagtcggaaaagacaccgtcggtatcattgccagagtatgtacctatctcgcagagacgaacatcaatgtgctggacatctcacagacgatcgtcaatggatattttaatatgatggcagtggtcgatgtgacaaacgcaacgaaagaaattgctgccgtttcaaaagagcttgaggaagtggggcttgggatcggcgtgacgatccactgtcagagagaagagatatttgaaaagatgcaccgtttataagcaaagacagaaaggacaggaagacagcccatgatcaatatatatgaagtcaatgagacaaaccagatgatcgaacaggagaacctggatgtgaggacgataacacttggcatcagccttatggattgtatcgactcagatctggacgcgctcaatgaaaagatatacaggaagatcacatccatggcggaacatctcgtctcaaccggcgagcagatcgagagagaatacgggataccgatcgtaaataaaaggatatccgtcacaccggcagcgctggtcggcggcgccgcgtgcaagacagaggaggattttgtcaccatcgcccgtacgtttgacaaagcggcgaaggaagtcggagtcaactttatcggcggttattccgcgctcgtatcgaaagcgatgacaaagagcgacgaggccctcatacggtccataccgcaggcgctggcgtgtacggaacgggtgtgcagttccgtcaatgtcggttcaacgaggaccgggatcaatatggatgcggtgcggctgtgcggagagatcgtaaaacagacagccgaggcgacgaaggaagacgattccattggctgcgccaagcttgtcatcttctgcaatgcgccggacgataatccgtttatggcgggagcgtttctcggagttacagagggcgacgccgtcatcaatgtcggagtcagcggtccaggcgtagtgaagcatgccattgaacaggtgcgcggaaaaggatttgaagaattgtgcgagacgataaagaagacggccttcaaggtgacccgtgtcggccagcttgtggcgggagaggcatccaggagaatgggggttccgttcggtattgtcgatctgtccctggccccgacaccgtctgtgggggacagcgtggcagagatcctggaggagatcggcctggagcgtacaggcgcgcccggaacgaccgctgcgctcgccatgctgaacgatcaggtcaagaaaggcggcgttatggcatcgtcctatgtaggcggcttaagcggcgctttcataccggtcagtgaagaccaggggatgatcgatgcggtaaatgcaggcgctcttacgctggagaagctggaggccatgacatgcgtctgctcggtggggcttgacatgatagcgattcccggcaagacgaaagcatctactatttccgggatcatcgcggatgagatggcactcggaatggtcaatcagaagacaacggcggtccgtctcataccggtcatcggcaaagatgtcggtgatacggcacaattcggcggtctgctcggttatgcgccgatcatgccggtcaatgaatttgactgcagtgtgtttgtgaacaggaaaggaagaattccggctccgatacacagttttaaaaattagagaggtaaataaatgggaaaagtagcagttgtgaccgacagcaacagcgggatcacacaggaagaaggaaaaaaactcggcatacgcatactgccgatgccgttttatatcaacggagagctgttctatgaggacataacactcagccaggaagagttctatcagaagcttggggaggacgcggagatatctacttcgcagccgtcccccgcagatgtgatggagctgtgggaggaactgctgtccgagtacgatgaagtcatccatatccccatgtccagcgggctgagcagctcatgccagacggcaaagatgctctccgcagaatttgacggaaaagtgcgtgtcatcgacaaccagagagtctctgtcacacagcgccagtctgccctggatgccgtcgagatggtacgccgcggcatgacggcgtcggagatagaagaggtgctgatgcaggaaagactggaagcgagcatctatatcacagtggatacgctgaagtatctgaagaaaggcggccgcatcactcctgcggcggcagcgctcggaacggtgctgaacttaaagcctgtactccagatccagggtgaaaaactggatgccttcgccaaagtgcgcggcataaaggcggcaaagagaacgatgctgaatgcgatggaaaaagatatagaagagcggttcaaaggcaggagagtgaacctggaagccgcctatacgtgcacagaggaagaagcccgtgcatggaaggaagagatagaggaaagattccccggttacgaggtgcacatggacaagctgtccctgagcgtcgcctgccacataggccccggagcgctggcagtcgcctgcagcagggagatctaaatggggatttttgttgggaatgtttgagcttgttggcggtggacggcagagggaccgggtgcgcgggggtgtaaaagagcgctccggcagccgggtatccgtaactgcagaaagagccggaatcagacaaccgagcctattcggtatgaaatcctgaaaggatttcctgcctcagaggctctcgggaatgttatttgtgataacattcccgtgtctgattccggctctttctgcagcaacggatcccacgtctgcctccgaacgcccttctacacccccgcacacccagcccctctgcctgctcatcgcacaggatgttaaacattccaagcaaaaggaagttcccctaggacgtttcaatgggtaaactcgtatccggaaaactaaggccatagtgtaaatccattacttcctagccagggaatcccacgcgttgaagtaatttgagttttgtgagggaacaggcagaggaatggcgggaggggtatgtggggcgttggagggagctttgtcaagcagttagggaagaagccgcggcagggacagaccgtcccacatccccctcccgccgttcctctgccgtacgcttaccaccctcccaaattcctccaacaaaaattcccatttataaaataacaatagactgctggtattcgttcacaaacggaagtttaaacttattcgttatgatcgcctcatacaggttggatgcaaatatgtcctgcgtcagcatccgggatccggtttcgctcagtgtatctgtctgtgtcagcttcgtgacaagcggcacgttcgagtgggctttcagatgagacaggacatgggccgcgtctttcctgaaacctaggatatgtgcgtaatgacagcagccgtcatcccggcaggagagcatatcgtattttgtgatgccgagcaggatgtggaacaggcttctgcttatgcgggtgtaagtcatgtctctcgttttcagcaggtcacagaactggtcaaatgtgatgaagtcattggcgtggtttatgatccggtttgccaggtcctcggtgatatccacatatttgacaagtgtgtcctttgtctctgtcagcagcttatacttgagcagaagcgagaaatcgttggaatagatcgggtagcgcgtgcggtgtgtctcctccagaaggcgtatgcaggaaggcggaacctgcccttccagccttgtgagcacttccgacatgaccggttcgtcaaacatgccttcatcctccagatggatggagttgctcgcataagcgagcagctttcggatggctgacgcggaactgtagctctcggagagggattcgtcgtggtagcctgagaccatacgcttgatcgtatacgtccttatggggcttttctttaagtacagcgctttgatatattcaataccgagaatattgttcggctgctccagtatggcatcgagggaatcgtctttaaagtaagctttcagcgccagctgccgggcccgcggaaaagaaagccctttgcggagtccttcctgaagtgagaacttgtattcctccggttcgtccgcaacgacatgcgcgatccgctccagtacgccgtgatccccgcattcgcttccgaagcagatagaatcgatgcagccgagctgttcaaatagagaaatggcgcctgccgcgaagtattcggcgctgccggtggcaaagcagacaggaagttccatgaccacaggaacgccggcttccagtgccacctcggcgcgcagatgcttcggcatgatggcgggcgctcctctctgtacgtaatttccgctcatgacgacgaccgcagcgtccgctccggttatctcttttgctttctctatatggtataaatgcccgttgtgaaacgggttgtattccgtgatcaaacctactattttcataagaatctccttgtatatccttctgaaattgattatactataaaaagaccgggtgcgcaaaatgaattgggtcatttggggagaaagccttgggagaggaggggtacgatgggtgaagagttcagccgcagcgatgcagatttattgcataatgcagaggacatctgtgatccgccgcaggagactgaagattacatggaagagcgggaagaactgacggaagaacgtatccttgaaatgctggaaaaccgccagtataaagaactcaaggaagaacttgaaaataatatgtaccctgttgacctggcagatatcctggcggattttgaacagaagcagcttgtcatggtgttccggcttctggccaaggaagaggcggcggagacattcacatatatgaacagcgatctgagggaacttctcatcaatgctctgactgattccgagctggaagaagtcatggaagagatgtacctggacgatacggtggatgttctggaggagatgcccgcgaatgtggtggacaggctcctcatggcgacagacgaggagacgagacagcagatcaacgccctgctccagtatccggaggacagcgccggcagcgttatgaacgtggattatatcgcgctcagaaaagagatgacggtggcggaatccatactgaagatcaggcaggtcggtttaaataaagagacgatatatacgtgttacgtgacagagaaacgccgtctggtcggcgtggtggatgtaaaagagcttttgacgacaagtgagtcgaagactgtggaagagatcatggatacgaatatgctctacgcccacacgacggacgaccaggaagaggtggcccggacaattacgaagtacggtcttatcgcgcttcccatcgtagatcatgagatgtgcatggtaggtatcgtcacggttgacgatgccatgtacgtactgcaggaagaggtgacggaagatatcagtatcatggccggtgtaagccccaatgaggagtcttactttgggacgggcgtcataagccatgtgaagaacagactgccgtggcttttgtttcttatgctgtccgcaacgatcacgcagatgatcatgaaccactatgaatctgcgcttgcggtcatgccccagcttgcaggatttatcccgatgctgatggggacgggcggaaactgcggttcccagagttcaacacttgtgatccgcggactggcagtgggagagatcgaattcggagatattgtaaaagtgatctttaaagagataagagtcgcgcttcttataagcgtcatactgtctaccgtaaatggaatacgtatactcgttatgggacagggggatgtgatgatcgcggtcacgatagggcttacgatggcctgcacgatcatacttgccaagatcgtgggctgcacacttccgctcgtagccaagaagatagggctcgaccccgccataatggcgacgccgctcatctctacactcgtggatatcagcacggtgacggtgtattttgcgatcgtcagtcttgtgttttccatctagcctggagaacagacgaatgtttgggcatatttaccaagatgttaaaaaaataacggttattgtattgaaaaatagacataagattacgggaagagaccttgtttacgaggtctctttgtattataatagaaatactgagaataaatggaaaggagtctattgatcatgggatttatagatgaaatcaaggcgaaagccaagacaagcagaaagacgatcgtgcttccggagacagaggatatcagaacttatgaggcggcagaggcagtgataaaagaaggcacagccaacgtggtacttgtagggagcaaagaggagatcgagaagaacagaggctctttcgatgtcagcggagcgactgtcgtggatccggccacgagtgaaaagacggacggctatatcgccaaactcgttgaactgagacagaagaaaggaatgacggaagaacaggcaagagagctgctccttacgaactatctgtactatggggtcatgatggtcaagatgaaggatgcagacggcatggtatcaggagcatgccactctacggccgacactttgaggccatgccttcagatactgaagacgaaaccgggaacaaagctcgtgtcagcgtttttcgtcatggtagtgccggactgcgatatgggtgcggacggaacatttgtatttgcagacgcaggacttgagcagaatccggatccggagaagcttgcggctatcgcgctttcctccgcagattctttccggcttctgacaggagaggagccggtggtggcgctcctttcacactctacaaagggaagtgcaaagcacgcggacgtggacaaggtagtggaagctgcgcgtatcgcaaaagaagctgcgcctgagggacttatgatcgacggtgaattccagcttgacgcagctatcgttccggagatcggcgcgtccaaagcgccgggcagcccggtggcagggaaagcaaacgtactcgtatttcctgacctggatgccggaaatatcggctacaagctggtgcagaggcttgcaaaggcagaggcatacggaccgctgacacaggggatcgcggctccggtcaatgacctgtcacgcggatgcagcgccaaagatatcgaaggcgtagtggcgatcactgcagttcagtgtatggctgaaaactagaacgtgaaaaaagaataaaagagaggtaaattcaaatgaatgtattagtaatcaactgcggcagttcatctttaaagttccagttaatcaactccgatacagagcaggtgctggcaaagggactctgcgagaggatcgggatcgacggaagtcttacttatcagccggaaggcggggagaaggtaaagtcagacaagcctatgccgacacatacggaggcgatccagtacgtcattgacgccctcacagatgccggtacaggtgttgtaaagagcctggacgagatcggtgcggtgggacaccgtgtcgtacatggaggcgagaagtttgcaagctctgttgtgatcacagatgaagtgcttcaggcgatcgaggaatgcaatgacctggcgccgcttcacaatccggcaaacttgatcgggatcaacgcatgccagaagctgatgccgggtactccgatggtggcagtgtttgacacagccttccatcagacgatgccggaggaagcctacatgtatgggcttccgtacgaatattatgaaaaatacaaagtgagacgttacggcttccacgggacaagccacagctttgtatccaaaagagcagctgagatcgcagggaaaccttacgaagaactctgcacgatcgtatgccaccttggaaacggtgccagcatctgtgccgttaaaaatggcagatctgtggacacatccatgggtcttactcctctggagggacttgtgatgggaacacgttccggcgacattgacccggccatcatggagtttatcgcaaagaaagaaggacttgacattgcgggacttatgaacatgctcaataaaaaatccggcgtgctcggactttccaacaatctgtccagtgatttccgcgatctggatgccggagcaaaagaaggcaataagcaggctgctgtggcgcttaaagtgtttgcctacagagttgccaaatatgtcggcgcatatgccgccgccatgaacggtgtggatgtcatcgcgttcacagcgggagtgggagagaattccgggccggtgcgcgccgatgtcctcggctatctcggctatcttgggatcgaagtggatgaagaggcaaacaacacgcgcggtgaggagatcacgatctcaacaccggattccaaagtaaaagtgatggtgattccgacgaacgaagaacttgcgatcgcgcgggagactgttgcgcttgtgtaggcagaaacgcggcggcacaatatctatgaaaaatgacgaattataggttgacaaacctcttttacacggatataatagtctaggtatgaataggggtgactatatgttgattgacctatccgaagtattgtctgaaccgcataagccgctggacgtgacggcagcgtgtacgatgcgtacatttcagggaaaagcgggcgtatatccggtcgtaccggaagaagacgcccacataaccgcagagtaccggggaagcggaaagcttctgatcaacggtgagtgcagacttaaagtgcttatcccgtgcgaccggtgtctcaaagaaataccggtggagtttgacctgaattttacaaagcgtgtgctggtgtctgagccggaagaggacagcggaaagacagaagagtatgacgaagcaaattatattgacggatatcatcttgacgtagataaattactctataatgagatattaataggatggccgatgaaagttctatgctgtgaagactgtaaagggatgtgcagcgtatgtggtcaaaacctaaatgaggggacctgtgactgtgaagacccaggtcttgaccccagaatgtcagttatccgcgatgtgtttaagaattttaaggaggtgtaacctatgtcaatttgtccaaagaataaatcttccaaagcaagaagagacaaaagaagagctaactggaagatgagcgctccaaacctggtaaaatgcagcaagtgcggcgaattaatgatgcctcacagagtttgcaaggcttgtggctcttacaacaaaaaagaaattatcgctcaggactagtgagtggaagcaaaggctttccgggaaaccgggaggcctttttcatttgcgcaaaaaagaagcgtgatctgatgttttaatactgttttaatatgaacctccgtcttttaacacagctttaagacagagcgtgttaggatgaattcagcttaattgaaaaggaggttacagctgtgatggatatagcgatggcggcagttctgctcggatgctttggactcatgaaagcgtttacagaatggtgctcgagacaggtagatatagatacccatgagaagggataggcagaggtactgccggatccagggagagaaaggagaagcaggatgatattacttggaattatcatattgctgattgcagcatatttactttatgctctcgttcacccggagaaattataacatcgatcaaactgagagcaggaacaggaggacaaaaaaagtcatgttacagattgcgctgactttagcgatatttattttggcagtgataccgatgggaaggtacatgtaccatatagctgccaataaaaaaacgttcgcggaccctttatttgacagggttgacaacggcatttacaaaatatgccggatagacagaaaaggaatgaactggaagacctatgcgttaagtcttctcatgaccaatgcggtcatgatactcgttggatatctcgttttgagacttcagcactcattgtttttaaatccaaacggaatcgaggggatggagccaaccctctcattcaacacgatcatcagttttatgacaaatacaaacctgcagcattactcaggagagtcaggactctcttatctgagtcagatgcttgtgatcattttcatgatgttcacttcagcggcatccggatatgccgggtgtatggcgttctgcagaggacttgcgggcaggaagaaggatctgggcaatttttatgaggacatggtgcggatcacgacccgtatcctgatcccgtggtctctcatattcggcctcgtacttatatggcaggggtgtccggagacattcggggccaacataactgtggaaacgattcaaggaaaactgcaggactttgcggtgggcccggtggccgcgctggagatcataaaacatctcgggacgaacggaggaggttttctgggcgcaaactcggccacaccgtttgaaaatccgacgataataacgaatatgatcgaacttatatccatgatgatccttccgggggcatgtgtgctgacatttggtaaaatgtgtcaggatcggaaaaaagaggaaacagcggccgcagtaaaagtaaaagagcctctgttcggcagacagggcaggacgatattcgcagctatgtccatcatattccttgtgggcctgactacttgcttcctgtccgaaaaagccggcaatccggttcttgaggcgtcagggatcagccaggacatgggaagcatggaaggaaaggaagtaaggttcggcgcggaccagtcggcgttgttcacaacggtcacgacttcatttactacgggtacggtcaataatatgcacgatacccttacgcctctcgggggaatggtgccgctcttacatatgatgctgaactgcgtattcggcggaaaaggcgtaggccttatgaacatgctgatgtacgccatcctcgccgtctttatatgcggactcatggtagggcggacaccggaatatctgggaaagaaaatagaagggcgggagatgaagctggtcgcactcgtgctgatcatacacccgcttctgatccttggattttccgcgctggcagtctcaatacagtcaggactggacggcataacgaatgatggattccatggtctgtcacaggtgctgtatgaatactcatctgcgtcggccaacaatggttcaggctttgaaggattatcggacaacacgtatttctggaatatcacgaccgggcttgccatgttcttcgggcggtatattgcgatcatcgcccagctggccgttgcaggttcgctgatggccaagaagcgtgtgaaagcatcagcaggaacgatgcgcactgataatgtgatttttgcggtgctgctcgtgtttatcgtttatatctttgccgcgctgacatttttcccggcgcttgcactgggaccgatcgcagaacatctgaccttatggttttcataaaatgaagaaagggatgtaagagaagaaatgtctaagaaacaacaaaaaacaaagttcgtgacaaaggatattctgaaaagttccgttatcggagcgttccagaagctcaatccggtatacatgataaaaaatccggtcatgttcatcgtggagacagggtttgtactgacactcattatgacggccgtcccgacaatattcggagatgacgcatcacttggttatctcagggtctataacgggattgtctctgtcatactttttattaccgtactgtttgcaaattttgccgaatctgtcgcggaaggccggggaaaggcccaggctgcgtcgctgaagaagacaaagcaggatacgcagtcgagacttatagggagagacaacacggaacgcatcgtgaatgcctctcaacttaagaaggatgatattgtactagtaaaggcaggggaaataatcccaaatgacggtgaagtcatcgaaggcatcgcatctgtggatgaatctgccataacaggggagtccgcgcctgtcacacgggaagccggcactgatttttcctctgtgaccgggggcacgacagtcgtgagcgactggctgaagatccgtatcacatccagaccgggcgagtcttttcttgacaagatgatcgctcttgtggaaggagcctcacggcaaaagacgccgaatgagatcgcgctgaacaccctgctcgtaggattgactgtcatatttctcatcgtagtcgtatgtctgtatccctttgctacatattcaggcgtgcagataccagtttctaccatgatagcgctgctcatctgcctgatcccgacgacgatcggcgggcttctgtcagcgatcggtatcgcgggaatggaccgggtgacgagattcaatgtcattgccatgtccgggaaggctgtggaggcgtgcggtgacgtagatacgatgattcttgacaagacggggacgatcacatttggaaacaggctggccgcagaattttatccggtaaaaggaagagaaaaagaggatctgatcgactatgcggtaatgacgtccctctgtgatccgacgccggaagggaagtctacggtagagctcgcccggagtatggggacgctgatcgatgaaagtgctgcctcacagatggaatttatcgaatttacagcgcagtccaagatgtcaggcgtggatctcccggatgggacaaagataagaaaaggtgcggccgacgccataaaggcaatggtgacggaacagggcggcagtattcccaaggatctggacggccttgtggaaaagatagccggacttgggggaacacctcttgtcgtggcagccggtaatgtgatctgcggggtgatctatctgaaggatacagtgaagccgggacttgtggaacggttccagagacttcgcgacatcggcatcaagacgatcatgtgtaccggtgacaatcctctcacagcggcgacgatagcaaaagaagccggtgtcgacggatttatcgcagagtgtaagccggaagataagatcgaggcgataaagagtgagcaggccgaaggaaagctggtagcgatgaccggagacggcacaaatgacgctccggcgctggctcaggccgatgtgggccttgccatgaactccggcacctcggcggcaaaagaggcggccaatatggtggatctcgattccgacccgaccaagatcctggaagtggtggagatagggaaacaactcttgatcacaagaggttcgctgactacattcagtatagcaaacgatgtggcaaaatattttgcgatcataccggccatgtttacattggtcataccgcagatgcagatgctgaatatcatgcatcttgcaacgcctatgtcggcaatactctcagccctgatcttcaacgccgtcatcataccgtgcctgattcccatcgccatgcgcggcgtaaagtataagcctatgagcgcagagcggatgcttctgaaaaatatgggaatatacgggctgggcggtatcatcgtgccgtttgccggaattaaaattatagattgtcttgtggcgccgttgttgtcggtgcttggtatataggagggaagtaagatgaaatcatttttaaaatatgtaagatgcgccgctgttttaaccgtgcttatgcttgttgtctgcggtcttgcatatccggccgccctgacaggccttggacaggcgttctttgcgcatcaggcgaacggaagtctcattacggcggaaggagaaaagacgacagaccccgacaaagcggtcggctccgccatagccggacaggacttttccggcagccccgaatactttcagagccgcgtgtcgggagtaaattacaatacgtatacaaaggaagagaaagaggacggttcgtattccggtgtggcatccggcggatcaaatctggccccttcaagtgaagaactgaagaaacgtgtagaagaatcggtggagcagtttctaaaggagcatccggacgtagagaaaggggatatacccgcggatcttctgacggcgtccggttccggcctggatcccgatattacaccggaggcggccaggatacagataccggccatcgcggccgagacagggctcagcgaacaggaattggaagaaatcgtcagccgcagcacggacggtaaagtgttcggggtattcggacacgagcgggtaaatgtcctgaagtgcaaccttgagatcgcagaagcactcggcgaatgataagcccgcggaaaacacatcaggatcataagacagggaactgccggcagccatgaaatggcctgacggcggttccctgtccgtgcaagaaggagagttcatatggacagagataaaaggccggatccccgggaagtgcttgaaaagattcaggcagaggaggataagatacgaagaaaggaatacggaaagctcaagatttttctcgggtacgcggcaggtaccggtaagacatatgcgatgcttgaggaggcgttagaactcaggaaaaataacatagacgtggtcgcggggtatatcgagccccacgcgcgtccggagacggctgctctccaggagggattggagcacattccattcctcatgaaagagtacaaaggcgtgaacatacgggaatttgatctggacgccgcgctggcgcgcagaccgaaggtccttctcgtagatgagctggctcatacgaatgtgaagggatgccgtcacgaaaaacgatatcaggatatcgaggagctgctggaacacgggatcaacgtctatacgaccgtaaatatacagcatctggagagtctgaacgacaatatcgccggcatcacgtcgatacagatgaaggagaggatccccgacagcatctttgacagggcagatcaggtaaagcttgtggacattgaaccggaagagctgatcgaacgcatgagagaagggaagatatacggccggatacaggcagaacgcgccctgcagaatttctttacaatggataagctgacggcgctgcgggaaacagcgctgcgccgtatggcggacagggtgaaccatcttgcaaaggaggaaaagaagcttttggggagaggagaatactctgcaggagaacatgttctcacctgtatctctccggctccgtcaaacgcaaaagtcatccgtgcggcggcgcgccttgcatatgcgtttcatgcagaatttacggctctctatgtagagacgaaaacgattcagaatgcgtcggagaaggtgaagaaaatgagggatgagaacatccgtctggcaagaacactcggcgcaaagataacgacagtcagcggggaggatgtggcgaggcagatcgcggaatatgcgaaagtcagcaatgtgacgaagatcgtgatgggcaggaccgcacataaaatctttttcggacagacgagaaagacgctcgttgagagtctgaatcactatgccccgaatctggatgtctatatcatacctgacctgcagagcggcaacgggcagaaacctccgtcgttcctgaagacagaacattgtctgaaggggcttaagaagacggatgttctcatactgcttttcatgctggcgcttggcacggcggcgggttttgccttcagtgcgtttcatatgtcggaagccaatatcataatggcgtatctgctctgcgttatgctcacagccatcaatacagaagggtatatctgttccgtgctctcgtcggtgttcagtgtgctgctgttcaattacttttttatcaaaccgcttcacagtctgcaggcctatgatacagggtatgtgtttacctttgtcatgatgctttccgtgagccttctgacgtcgtggaatatgtccaatatacagaagcagagcaaggagaatgccaagcgtgcataccggacggagatcctgcttatgaacagcaagaaactgaggcgtgtgaagggacgcagagacattggcgatgagctggcttcccagatacagaagttgatgaacttcaccgtaatcatatatatgaaaacaggcgggcgtatccagcagccggatgtctatttgagagaggggatacggaaagagaacagggcttcgctcatacaggactatacttccacagaggagcgtgccgttgtctcctgggtgtttgaaaacggacacagagccggctgtacgacacatacactaccgtatgcgaaggctatctatctcccggtcatggatgacgacaatgtatcggcggtcgtcgggatggtattggaggagaggcgggagatcgcggcctttgaatatgatttgataaatgcgatgctcggggaggcggccctggtgtttgagcggtttcagaaaatggaggataagacgggtgattctttaacaaaatgattgatttttacaggaatgtctagtagaattaatcctagtagtgctgggaggaagaaagaatgactgaaattacaagagtagcgctggatgccatgggcggtgacaacgccccgggcgagatggtaaagggtgctgttgacgctgtggcgagagaaaaaagcatcaaggtttttcttgtcggtaaggaagaggccatacgcagggaactggaaggctgtacttacaacagcgaacagattgagatcgtgaacgccacagaggtgatcgagacggcagaacctcctgtcaatgccattcggaggaagaaggattcctctattgtcgtaggcatgaagatggtgaaggccagcgaggcagacgcgtttgtgtcagcggggagttcaggggccatccttgtcggaggccagacgcttgtaggcaggatcaagggtgtggagaggccgccgctcgcgccgctcatcccgaccaagacaggagtatctcttctggtagactgcggagccaatgttgacgcgagagcgtcccatcttgttcagtttgcaaagatgggttccatatatatggagaatatcatgggagtaaagaaccccagggtcggcattgtcaatatcggcgcagaggaagaaaaagggaatgcgctcgtcaaagagacgtttccgcttttaaaagagacagaaggaatcaattttatcggcagcgtagaagcgagagatatccctcacggagcagcggatgtcatcgtgtgcgaggcgtttgcgggtaacataatacttaagctttacgaaggggtcggggatgtcctgatcaaaaaagtaaaggcgggtatgatgacgagtctgcgcagtaagatcggagcgctgcttgtaaagcctgctttaaaggagacgctgaaagcttttgacgccagcgagcacggcggagcgccgctgcttggactcaacgggcttgtggtgaagacacacggaagctcaaggtccaaggaagttacgaatacactcatacaatgtgtgacatttaagcagcagagaattaatgaaaagatcaaaaattgtattcaaacggatgctgcatccgctgaataaagattactcaatggattaagaaaggaagaaatggtatggaatttgaaaagttgcaggaaatcattgcagatgtgttgaatgttgaggcaggggacattacaatggagactacttttgtagatgatttgggggctgattccttagatattttccagataattatgggaatagaagagacctttgatatcgagatcgataatgacgatgctgagaagatcgtatcggtaggcgatgcggtggaacagattaaaaacgcgacaaataactaggtataaaagatgcggaaaagcccggcagggctttttcgcattatgaggagtgtaactttatgaatcaggatttaaaacaactggaaaaaaggatcggctacacatttaaggaattcggactgcttaaaaaggcgatgatgcacagctcatatgccaatgaacagcatctgcacaagtacgagtgcaatgaacggctggagttcctcggagatgccgtgctggaacttgtgtccagcgagtttttgttctatgagcacgcaaagatgccggagggagagctgacgaagacgagggcgagcatggtatgtgagccggcgctggcattttgtgccagagagctgcagatcggtgattttctgctgcttggaaaaggggaagacgctacaggagggcgaaagagggagtctatcacatcggacgcgatggaagcgctgatcggagcgatatatatagatggtggttttgctaatgcaaaagagtttatcgaacggtttattctgaaagacctggagaacagaaaactcttttttgatagcaagactatcctgcaggagatcgtacaggctaattttaaagacgcgatcacctatcatctcataggggaagaagggcctgaccacgacaaatcatttctggtagccgtgcacataggggaagatgaatacggcattggccgcgggaggacaaagaaggcggcagagcaggaggccgcgtatcaaagtattctgaagctgcacaagaagaatataaagtaggtggagtatgtatttaaaaagcatagaagtgcagggattcaagtcatttgcacataagataaaatttgatttccataacggcataactgccattgtagggccgaacggaagcgggaagagcaatgtcgcagacgcggtgcgctgggtgctcggcgaacagagagtgaagcagctgcgcggcggcagcatgcaggacgtcatattttccggcacggagaacaggaagcctttgagttatgcgtctgtggcgatcacgctggataattcagaccatcatcttccaatagactatgaggaagtgacggtggccagaaagctttaccgttccggggagagtgaatatctgatcaacggaagcggctgcaggctgaaagatgtcaatgagctgttctatgataccggcatcggaaaagaaggctactcgatcatcggacagggccagatagataagatattaagcggaaaaccggaagagcgcagggaattgttcgacgaggccgccggtatcgtgaagttcaaacggcggaagaacatgtcggtaaagaagctggaggaggaaagacagaatctgctccgggtaaacgatatcctctcggagcttgaaaaacaggtcggcccgcttgaaaagcaggccgagaaggcaagggagttcctgaagaaaaaagaagagctgaaaaaatatgacatcaatatgtttctgctggagacgaagcggctgagcgatcagatacaaagcattgacggcagactcgataccacgcgggcagaactggatgaggcgaacagccgttatgaggacatgaagacagaatacgagtccgtggaagagcaggtcgacagcatcgacgcgtcggtagaaaaggcaaaaagccagctgaatgagacaaatatgctgaaacagcagctggagaaccagatagcgctcctaaaagaacagatccacagcgcgcatatgaacgacgagcactatgaccagcgtgcgaaaacgatcgacagtgagatagcagaaagagaaaagcagctgacggaacttgtcacggaacaggagagtattcaggcggagctggatgaaaaggggaagcttgaacgcatggccagggcagagctgatcgaggtggagacgcgcatcgccacgctgacggcatccgtggagagcaataagaaggatattatcgaactgctgaacagcagggcatctacgaaagccaagatccagcgctatgacacgatgctggaacagatcgaggtgcgaaagagccagatgaacaagcaggtcatcgagtgtgagagcgaagccgcaaagcaggtagtacatctggaaacgttccagaaggaactcagggagatatccggacagatcatagagctgacagaagaaagcagtacatacgaagacaagatcaaggtgatccaggataagcttgccagccagaacgaacagttccgcatcggccagacagcatatcacagggagcagtcgaggcttgagtctctgaagaacatcacggagcggtatgacggttacggcaacagtatccgtaaagttatggacaacagggagaaggaaaaaggacttctcggagtcgtggctgatattataaaagtggataaagactatgagatcgcggtggagacagctctcggaggaagcattcagaatatcgtgacttctgatgaggacactgcaaagcgtatgatccagtttctgaaacagaacaagtacgggcgcgcgacgttccttccgcttacggccattaaggcaaacgggggcatctacaggcaggaggcgctgaaggagccgggcgtggtcggcacggcggacaagctggtcacgacaggagaaaagttcaaaggactggcagaatatctcctcggaaggactctcgttgtggatcacatagatcacgggatcgccatagcgaggaaatacaggcagtccatccgcatcgttacacttgagggagaactgatcaatccgggaggctccatgaccggaggcgcattcaggaattcaagcaatctgctgagcagacgccgtgagatagaagaatttgaaaagacggtcagacagctcaaacgggagatcgacgagctggaggcagcgtccgacgcactgcgtcaggagcgcaccggatattatgataagctggaagaattgaaaagccggctgcagaaagcatacgtcatccagaatacggcaaagatgaatgtggaccaggcggaggccagaatacggaccgccagaaactcggcgtccggtcttaagagagaagccgacgagctggacagccagatcacagatatcattgacaaccaggagtccatcaatgtagaactggatacatcggagagtcttgagaaggaacttacagacaagatagaaaaagaacagaagatattggaggctgaacgggaagaagaggggcggaagcagaaagccgcggaagagatccatctgtcctatgctggattagagcagaagtatacgttcctgcttgaaaatacagaacgtatccaggaggagatcgccaaattccaggaggagctcagtgagctggaagccagcaaaggcggtacttccagggaaatcgaggaaaaagaagagcagatagaggatctgaaaaatacgatcatcaactcaaaagaactgtttgcggagatccagcaggagattgaacggctgaagcaggagcgggaagaactgaacagaaaacataaggtatttctgcagaagcgggaagagctgtcccggcatatgtcggagctggataaagagatattccggctcgaaagccagaaagagggatacgaggaagcttctgagaagcagatgaattatatgtgggaagaatatgaggtcacatataaccatgcgctggaaataagggatgaatcactgacagaccttgcgcggatgaagaagcagatccagacgttaaagggcgagataaagggactcggagatgtcaatgtcaacgcgatcgaggactataaaaatctgtccgagcggtatgaatttcttaaaaaccagcacgatgacctcgtggaggcagaggccacgctcgtgcagatcatcgaggaactggatgaagcgatgcgcaagcagttcagggaacagtttgaccttataagcggggaatttgaccatgtgttcaaggagttgttcggcgggggaaaaggtacgcttgagctgatggaggatgaggatattctggaggcaggcatccggatcatcgcacagccgccggggaagaagctgcagaatatgatgcagctgtctggcggggagaaggcgctcaccgcaatcgcccttctttttgccatccagaacctgaaaccttcaccgttctgtctgctggacgagatcgaagcggcgctggatgacagcaatgttgtaagatttgcaaaatatctgcataaactgacgaagaatacacagtttatagttatcacacatagaagaggaacaatgacggctgcagacagactctatggaatcaccatgcaggaaaagggtgtatctaccatggtctctgtgagcttacttgaagagcagctggataaataggaggggttatgtccgaagaagttaaaatggaagaagtgaagcaggaatccgaggaaaagcaaggatttttccggcggctcgtctccggtcttacgaagacgagagataatatcatttccggcatggacaatatattcagcggattctccaggatcgatgaagagttttatgaagaactggaagaagttctcataatgggagatctcggtgtccaggcgaccgacaatatactggaagacttgaaagaaaaggtcagagccagacatatcaaggagccgtccgagtgccggcagcttctgatcgacagtatcaaggagcagatggatatcggtgaaacggcctatgagttcgaggacaggacttctgtcgtgatggtcatcggtgtaaacggggtcggaaagacaacaacaataggaaaactggcagggaaactgagaagccgccataaaaaagtcgtgctcgcggcggcggataccttccgcgcggcagcgggggaacagttgaaggaatgggcagaccgggctcaggccgagcttatcggcggccaggaggggtcagatccggcttcggtagtatatgatgctgtggcggccgcaaaggcacgtcatgcagacgtgctgctctgtgatacggcaggacggctgcacaataagaagaacctgatggaagaactgaggaaaatgaaccgtatcatagacagagaatttccggatgcctacagggaaacgctcgttgtcctcgatgcgacgacaggacagaatgctcttatgcaggcgaaggaatttaatgaagttgccgatatcaccggaatcatcctgacgaagatggacgggacggcaaaaggcggcatagcagtcgccatacaggcggagctcggaattccggtgaagtatatcggggttggagagacgatagaagatctgcagaagtttgatgcggacgaatttgttaatgcgttattcacgactgaaaagccggaagaataaataggagaaaaaagggaggtattcatatgatgacactagaaaaattcgagcaggcaagtgagctcgtaaaaaaagtaaccaatcccaccaagctggtctacagtgagtatttaagccagcaaagcggcggcaagatatatctgaagccggagaatatgcagtacacaggtgcttacaaagtcaggggcgcttattataaaatcagcactctgtcggaagaagaacgcgggaagggcctcattacggcctctgccggcaatcacgcccagggagtcgcctatgcggcccagaagtatggctgcaaagctacgatcgtgatgcctacagtgactccgctcatcaaagtgaaccggacaaagagctacggggcggaagtcattctccacggcgacgtgtacgacgatgcatgtgactatgcgcttaagcttgcggaagaaaacggatatacatttgtccatccgtttgatgatctcgatgtggctacggggcagggaagcattgcaatggaaatcgtgcaggaacttcctacggtagattacatactcgcgccgatcggcggcggcggccttatctcaggcgtatctaccctggcaaagatgctgaatccgaagatccagatcatcggtgtggagccggcccaggcagccagtatgacagccgcgctcgccaacgaaggtccggtcacgcttccgagcgccaacacaattgcggacggtacggctgtaaagcgggtcggtgagaaaatattcccgtatgtacaggagaatgtagacaggatcgtcacggtagaggacgatgagctcataggggcttttctcgatctcgtggagaaccacaagatggtcgtggaaaattcaggccttctcactgtagctgcgctgaagcagctggacttaaaaggaaagaaagcggtagcgatcttaagcggcggcaatatggacgtgatcacgatgtcctctatcgtacagcacggactgatacagagagaccgtatcttctccgtgtccgtgcttctgcctgataagccgggtgagcttgtacgtgtagcggctacgatcgcggacgcccagggtaatgtcatcaagcttgagcataaccagttcgtaagtacgaaccgcaacgccgcggtggagcttcgtatcacaatggaagcattcgggacagagcataagcatgagatcatgcaggcgctggaggatgaaggattccgtccgagggagatcggagcaaaattatattagtgtaaaggggagatgcatatggaacatcacattcctcagaaaggagaacgttaccgccattttaaggggaacctgtatgaggttctggcggtggcgtcgcattctgaaacggcacagcagcttgtcatttatgaaggcctttacggggaacatccggtatacgccaggccgcttgagcagtttatgggcagggtagacgcggagaaatatccggacaggggacaggagtaccgttttgagctggaggaagagagtgaggccggaaacggacagagtctgatcatggagtttctcgatctggatacaaaagaggagaaggttgaattcctgcagcgggagaggatgaacataacggaggactttttatgtgcggcggccatgagtctggactatgtggagagcagggaagatccggacctgcgttatgaagacctgatgcattatctgaaaacgttgatacgctatgaaaacaggagaagatgaaagtcttcttctttttttattttattttaatacaggcggcacatcctttaacacctattttatatggcgcctgttatgatgagtttagaaaggaagaagaatcaaggaggcagtggatgatgaaaaacagagaaaaagatcaggccggtacagacggtccgcagatggcagagctttgcgcgaaggtaaaggaatatgtcgagaatgaagactgggaaagctgtatggaactgataccaaaatatatggagcaatacccggacagcgcagtgccccataatctgatgggcattgtgctggaaagccagggaaaacacccggaggcgatgcggcattttcgagcggcatggtcgctggactctacgtttgtgccggcaaaccgcaatatggacgcatatgctgtctatgacaggacgcagaaagtagtgccggcttacacgatggaagactgtatgccaaagacggaaccgggggctttgcagaagacaagtttttttctgcgcagcctgctggcgaaccgctcgaagaaagcaggcgcggcataagagagtgaaacgctgcgtatgcgcgtaagctaaatcttgcattggacgacattttgaagtaagatatacgcaggtgaaaatgatggatttagaagaaaacaaaataattccggatgcgcgcgcaaagcagcacggaagaggaaaacttaagatttttttcggatatgcggcaggcacagggaaaacgtatgccatgttgcagtctgcgcaaaaagcaaaagaggcgggtattgacgtcgtcgccggctatatcgaaccccatacaaggccggagacgatggcgctggcccaagggctggaaatgcttccggcaaaagaactgccgcgccgcaatatgatcctgcgggaatttgatctggaagcggcgcttgaacgcagaccggaactgattctcatagatgagcttgcacacgcgaatgctgcggggtgccgtcatgaaaagcggtaccaggatatcagagagctgctgaaagcaggtattaacgtgcatacgactgtaaatgtacagcacctggaaagcctgaacgatctgatcgccggaattacgggcgtcattgtgaaggaacggattccggattcagtgtttgacggggcggatcaggcagaactggttgacatagaaccggaagaactgctggaacggataaaagaggggaaaatttacggggaaagcgaggcggaccgggcaatgggtaattttttcacagaagcgaatctcgtctcactgagggaaattgccctgcggagaatggccgaccgtgtgaaccgcgcacgggatacgatgactcctttaaggagcgggacggcggaacatatcctcatctgtctgtcgccgtctccctccaacggaacggtcatccgccaggcggccagaatggcggcggccttccacggcgattttacggcgctgtacgttgagacgcccgaagcctctgaccggtccagagcggatatccggcagatgaatgaaaatatgcggctggcagaacagctcggcgcgaagatcgtcacttcgtatgggagtgatatcgtggaagagatcgcggcttacgccaaggtggcccgggtcacgaagatcgtacttggcaggacatatacacggcgcaggcttctgtttatcaaagacagtttttcagagcagttgagcaggctggcgccgacgctggagattttccttattccggatacttatgacaaatcgtacagagcggaaaaaaggagaaaaaaaccggcggatgtgcagagcagtacggccaaggatgctgttgtatgtgtgctgagccttatatgctccacagctatcgcgtttctgctgaaccgtttctttggtttcagcgcggccaatatcgtgatggtctatatgctcagtgtgctcatgtccgccgtgtttacaagccgtcaggtatgggggatcatcgcaagtgtaatgagcattctcatattcaactttttcttcacagagccgtaccgtacgctgcaggtaaatgaccccggatatctgatcactttctgtgttatgtttattacagctgtcatcagttcagccctgacgaaaaaggtaaaaaactatgcgaggcagaacgcaaaaaaggcgtaccggacggagatccttctggagacgagccgaaagctccaggatgcagggacgcttgagaatatagcaaagaagacggccgagcagctcaatatgctgctggaacggaatgtttatttctatctcgggaggccggagaagaaaaacaggccggtcgtgtgcaaggcagatgagaccgcgcctgatatgctggaggatgacgagcttgccgtggcacaatggacataccagaataataagcatgcgggatactccacgcagacgcttccgggggcgcggtgcctctgtatggcagtgcgcagcgcagataaagtgtttgcggtcgtggcgatagatatgcagctaagagagatccctgctttcgaggagggaatcatgggtgcgatactgaacgaatgtgcgtttgctctggagaaggaagaattgatcatagaacggaaagaggcagacgtaaagcttcagaaggaacagctcagggcgaatctgctccggtctatctcgcatgatctgcgcacgcctctgacgagtatttcgggaaacgcagagactttgatgggaaatgacagtgaattgagccggcagcagaggaatgccatttataaggatatatacgatgattccatgtggctcgtcaatcttgtggagaacctgctgtctgtcacaagaattgagaatggctcaatggagctcaatatacagggagagatactggaggatgtcataaccgaggcgctcaggcacgtaaaccgcaggggacgggagcaggtcatcacagttgagtgcgatgaacttctcatggcccggatggacgtcaaactgatgctgcaggtaattatcaatctgacggacaatgcagtcaaatatacgccgccccactctgagatcatgataaaggccaggcgtcatggtgacaaggcggtcgtcactgtcgcggataatggtccgggtataaaggaggacgaaaaggaccgcctgttccagatgttttatacgtccagcaatacggtgtcggacggccggcgcggaatgggacttggccttacgctctgccaggcggtggtaggagcacacggcagtgagataaaagtgtatgacaatgtgccgcatggtgcggtatttagatttgaacttgaagtggaggaagtaatattatgacagcgaacggaaaaccgtacgtccttgtagtggaagatgacgcgccggtcagaaatctcataacaacaacgctggaatcccagaattataaatacatgacgtctgcaaacgggaatcaggcagtcatgtcggcggcctccgggaatcctgatatcatattgatggatctgggactccccgatatggacggtgtggatgtgatcaagaagatacgcacatggtcggtggcccctataattgtgatcagcgccagaagtgatgataaagataaagtagacgcccttgatgcaggggcagacgattatctgacgaaaccgttcagtgtggaggaactgctcgcaagactccggtcaacgctgcggcggatccagtatctgacacaaaaaggggaggaggagccgagcgtatttcacaatggcagccttaccattgactacggtgcgggcacggtgtatgtaggtgagcaggagatccacctgatgccgctcgaatacagcctgctctgccttctggcccagaatgtcggaaaggtgctgacataccagtttattctcgataaggtatgggtcaatgccattgagagcgacatgtcgtcacttcgcgtctatatggcttctctcagaaagaaaattgaaaagaacagcagccagccgcagtgtattcagactcatatcggaatcggataccgtatggtccggctgaattaaggagacagttcttaagtgataatacagagtcagttccctgcaacgtgaagagaagggtgagttcatcttccgtcgcagagaacgggctctttttttggaataattttcttgacaatgaatgtataattgtatacaattatacatattaaggcggcactgcgctgaagcgccgcactatttattcagaaggagagataatgatggaagacaggaaagtatatcttgataaacattcaaatctgctgcagctggaggagcatatgtatccgcttgtggacgtggaaaagccgaatgtgttccgcaacctttttcattatgatgagataccgaagatcgcgtttaatgaccgtatcgtgccgcacagcatgccggatgagatatggatcacggatacgactttccgggacgggcagcagtcacgggctccttacagtacagaacagatcgtgaccatgtacgattattttcacaggctgggcggaccgaaggggaagatccggcagtgtgagtttttcttatacagcggcaaagaccgggacgctgtgtacaaatgtcttgaacgggggtatgagtttccggaagtgacgagctggatcagggccagcaggaaagactttgaacttgtaaaagagatcgggctgaaagagacgggcattctcgtaagctgctccgactatcatattttttacaagctgaagatgacgaggcgggaggcaatggaacattatctgtccgtgatacgcgagtgcctggagacggggatccgtccgcgctgtcatctggaggatatcacaagatcagatatttatggtttcgtcatcccgttctgtcttgagctgatgcatctgatggaagaatataagataccgatcaagatccgcgtgtgtgatacgatgggttacggggtgaactatccgggggctgtgattccccgctctgttccgggaatcatctacggcctgcgcgtccatgccggcgtgccgagcagtcttatagagttccacgggcacaatgatttttacaaggcggtcagcaattcaacaacggcatggctgtacggggcaagcggcgtaaactgttctttgtttggcataggggagcggaccgggaacacgcctctggaggcgatggtatttgagtatgcccagatccgggggacgctggatgggatggatacgacagccatcacggagctggcggaatattacgagaaagagatcggatacagggttccctccaggacgccctttgtcgggagaaattttaatgtgacacgagccggaattcatgcagacggactcttgaaaaatgaagagatttataatatatttgatacggagaagtttttaaaccggccggcactcgtggccgtatccaacacgtcgggccttgcgggcatcgcccactggatcaatacatactaccggctgcgaaaggatgagcaggtggataagagttctgaacttgtggcgatggtaaaagcgtgggtcgacagagaatatgaggacggccgcgtcactgttctgactgacgaggaacttacaggcgtcatagaaacggcctgtaaacagcttggaatatgtcttaaataaatcattgggggtaaacagaagtaatggaagagtatcaggacaggtctctgcggggcagggttttccagaagctgagggaggatatcctctccggcgtgtataaagaacacgatgaactgcgggagatcacgcttggggagacgctgggcgtcagcaggacgccggtccgggaggcgctgcggcagctcgaactggaagggcttgtgacgatcgttccgaacaagggagcatatgtcaccgggataacacagaaggatgtgcacgacatctacaaaatacgttctatgctggaaggtttgtgcgctcattgggcgacagagcatattacggacaggcagatagaagagctggaagagatcatcctgctgtcggaatttcatctcggaaagaaaggaagcgagcaggcagagcaggtgagcgaactggacggaaagttccataaagtcttgtatgaagcgtcggatagtcgtatactggaacatgtattatctgattttcacaaatacgtgcagatggcgagaacgatgtccgtaggcgcaaaggaaagggcggaaaagtccatagaggaacaccgcgcgatactcgaggcgatcaagcttaaggatgccgacagggcggaacggcttgccaacgcgcatattatgaaagtgatggaaaaccttcacatagaggagtaaaaagaaaaggagagttacagaaaatggcaaaaatcaagatggcaacaccaatcgtagagatggacggggacgagatgacaagaatcctctggcagatgatcaaggagaatctgctggaaccgtttattgaattaaatacagaatactacgatctcggccttgaacacaggaatgagacagacgatcaggtgacggtcgactctgcaaatgcgacgaagaagtataaagtggctgtaaaatgcgcgaccatcacaccgaatgccgcccgtatggaggaatacgatctaaaagagatgtggaagagccctaacggaacgatccgtgctatccttgacggtactgtattccgcgctccgatcgtagtcaaagggatcgagccgtgtgtgaagaactggaaaaagccgatcacaattgcaagacatgcgtacggagacgtctacaaaggcacggagatgaagatcccgggggagggaaaagtagaactcgtatatacggccaaagacggatcgaagagcagggaactcgtacatgatttcaccggcgcgggcattgtacaggggatgcacaatgtcaatgagtcgatagagagttttgcacggagctgctttaattatgcactcgatatcgggcaggatctctggtttgccacaaaggatacgatctccaaaaaatatgaccatacattcaaggacattttccaggagatctttgaggaagagtacgagaacaaatttaaagaggccggcattacatatttttacacgctgatcgacgatgcggtggcccgcgtcatgaagtcagaaggcggctatatatgggcgtgcaagaattacgacggggatgtgatgagcgatatgatatcgtctgcattcggttctcttgccatgatgacatctgtccttgtatcgccggaaggatactatgaatacgaggcggcacacggcaccgttcagagacattattataaacatctgaagggcgaagagacatccacaaactccgtggccaccatattcgcatggtccggcgcgctcagaaagcgcggagagctggacggcagcagagagcttatggaattcgccgacagactggaaaaagcgaccatagacacgatagaagagggaaaaatgacaaaagatctggcactcatcacgaccgtggagaaaccagtggtgttaaacagtgaagaatttataaaggcaatagcagaaaaactcgcatagacgaatatgtacggcacgttttggtacgcagcacatgaaaaaggctgggtgccaaattgtgttttcatgtgtacgaggttaaaacacggtctgtactgataagaaggtgagtataccatagtgagacaccagatgtaaggacgataaaggggagaactaaaatgaagatactgatgatcaacggaaccatgcagaagggctccacatatacgattggaaagatgtttattgagaggacagcgtctgaggaagattcagttaaggaactgtttcttccgaaagatatgccggaattctgccgcggctgcgcggtgtgtatccgccaggatgaaaagaagtgtccggattatctcatatatatgcggcggatcacagagatgatagacgaagcagatctgctcgtgttcacgtcacctgttctggtgtaccatgtgtcagggcagatgaaagcacttctggatcattacggttaccggtggatggtacaccgcccggacgcatccatgtttcgcaagcaggctgtctgtatcacaacagcagcgggcgccggaatgaaaaaggcgctgcgggacatgacggacagtctcagatactggggagtggccagaatatatatgtacggcgtcgctgtaggcggcgggatagacgacacgaacagagaaaagatagagacagcggtccataatcttgccgaaaaaatagagcatgacgcgtcgaaagttacgccgggactgcgggtaaggattctgttctatatcatgagatttatgcagaaacgaacaggcacgacagaaacagataagaactattgggaagaaaaaggatggcttggaagaaaccgtccatggaaataaaccgccataacagcagatacatgaggctgccgcactatgcggcagcctcatgtattacagacaaggaaatgtccgggatcaatcagccagctcttcccatcttatatacaattcttcaagctctgtctggattgcggctttctccgccgccagctcctgacattgtacggaattcgtgtacacctcttcctgtgtcatgagggtgtctatctcggcgtcgcgctcttccagagcagtgatccgttcttctgtctttttcagatcattctggcgtttccgttccttcgcctgggcttccttttgttcctgccagctcagtttggattcggacacggcctcctgcgcccgggataaatcttcagactgcccggatccggcatatacggcggtaagctcttctttcttttcaaggtagtaatcgtaattcccaatataattgacaaaggtctgattcacgaggtcaaggattcttgtggccgtctcgttgataaagtaccggtcatgcgacacataaagcacagtgccggtgtaatcgttcaaggctttttccagaatctccttggacgtaatatcgagatggttggtcggctcgtcgaggatgagaaaatttgcttccgagagcatgagcttggccagtgacacacgtccccgctcgccgccgcttaagtccccgatcatcttgaacacgtcgtcgcctgtgaagaggaaggcggccagcatattgcggatctgcgtgtttgtgagatgcggatagtcgtcggagatctcttcaaagatcgtcttgtccatgtggagcacgtggtgttcctgatcatagtatcctatctctacattggttccgagcgtaaaggtaccgctgtcggcaggcactacgttgttcagtatcttcagaagcgtcgtcttgcctgttccgttgtcaccgatgacggcaacatgttcgcctctttttatctcaaagctgacatcggaaaacagacgctgggacggaaaggacttgctcagatgctccacgctcagcacatcatttccactgatgcaggacggctccagcgacagatgtatctctgtgttcgtctcctttggtttctcgaccggctgcagtttggcgagcattttctcgcggctttcggcccgtttgacagatttctcccggttaaaggagcggagcttttcgatcactgcctcctgatgtttgatctcctgctgctggttcatatattctttcagcttcgcgtcccgtatcatcttttttttctctgcatactggctgtaattgcccatgtagacggagagtgtgccaagttcgatctcaagaaccttcgtcacgactctgttcagaaaataacggtcatgtgagacgataagtacggcgccctgataatttaacagataggtttcaagccatgcgatggagttgaggtccagatggttcgtcggctcatccagaagaagaatgtcaggctttgtcaaaagaagcttgccgagagagaccctggttttctgccctccggacagtgtgtcaacgctcttggcaaaatccgattcgtcaaacccgagaccttttaaaaccccggtgatctcactttcataggcatagccgttggcccgctcaaaggcagcggtcagacggttatatgtgtcaaggcgcgcttttaaagcatctccttcgagatgctttaattccagttcgatcgtgcgtatctggcgttcggtctcgatgatatccgcctttgccgtcctcacctcttcatatatagtattgccgcctgtcattttctggtgctgtgccagatagccgagcgtctttccttttgtgagtatgacctctccggcgtcagccggaagctcgccgaccatcatcttcagtatggtcgattttccggcgccgtttggccctacgagggcggctttctcatagtcttctatatgaaaagacgcatctcttacgatgacatcttctccaaatgctttacttattccgtgacatgccagtatcataacttcctcccacgccgcgcctgcaatgcttcaaaagcgggcgctgctaccattcattatatcgaaaataggacaaaatacaactaaaagtttgactttgaagtgacaattctatataatattttttagaacgtaacaggaaggtgagtgctagtggaagaaagagaaatctctcaggcggtgatacgcaggctgccaagatattacagatatttgggggaactgctggagaacggggtcgaaagaatctcctccaacgatttgagcaagagaatgaaagttactgcatctcagattcgtcaggaccttaacaatttcggcggtttcggacagcagggatacggttacaatgtaaagtatttatatacagagataggcaagattctcggtctggaggaagaccacaatattgtcatcatcggagcaggtaatctgggacaggcgcttgccaattatgcggcttttgaaaaaagagggtttatcttaaagggcattttcgatgtgaacccgaggctgaacggtgtttcgatcagaggcgtgccgatacgcatgatggacgaactcaaagactttgtccagaataataatgtagagatcgccgtacttacgattccgaaggaaaaggcgatcgaggtggcaaacatgcttgtagaaaatggtgtgcgcgcgatctggaattttgcgcataccgatctgaatctgcctgaccacattatcgtcgagaatgttcacctgtctgaaagcctcatgaggctgtcttacaatatcagccgttacaacgatgagcacagcggcaaaaaataaggaagtataaaaacgtgtaacgatgggcatgtgaagaacaggcttgtctttacacgttcttttatataccggggagctttgggtgaaaaaggttccgggaaaataacaggaggtgagaggtatgaaatatttactgaatgcatcccagatgaagcgcgcagacgagtatacgaccggccggcttcggattccgtcactggaactgatggagcgtgccgcggccgggtgtgtggatcacatggaagaaagcggcctggacctgacaaatgtgtgcgtagtatgcgggaccggaaacaatggcggcgacggctttgcggccgcaaggatgctgacagaaaaagggcacagggtcacggctgttctctgcggggaagaagaacactgtacaaaggagacaaaggagcagataaagcggctgaggcagacgggcgccgcgatcactacggaattcagggaaggcagctacagtgtggtcattgatgcactgttcggcgttggattaaaccgtgagatcgaaggaaaacgcagggagcttattgacgccatgaaccgctccgggggatttaagctggcggtcgacattccgtccggcgtgtgcgcggacagcggcgctgtcatggggactgcctttcgggcggacgcgacagtgacgttccaggagatgaagcttggcatggaattatatccgggaaaagagtatgccggtaagacagtgacagtcgatatagggatagatacgtcagagataaaaaaggaaaaagacgcggcatttacgtatgaatgcggtgagtataaaagcctgcttccggtgcgcagggcggattccaacaaaggtacttatggcagggtgctggtcatcgcgggaagcaggggcatgtcgggggcggcttacctgaatgccagagcagcgtatacggcgggcgcgggactcgttcagatctatacgtcggaggataaccgcgtgatactgcagacgcagctgcccgaggccatcatcaggacatatgacttttacgatgaagtggaattgttaaagctcctgaactgggctgatgtcgtaagtgtcggttcagggatcggaacgagtgacaaatcacgaaagatactcaggacggttatggagaatgtggaggtgccgtgtgtgatagacgcggacggactgaatctgatcgcagaccataagaagtatcttgaccggctgaggcatgaaaactttatattcaccccccacatgaaagaaatgtcccgtatgacaggcaaagatattccgcagctgagagcgcgcagaatagagatactgcgtgaatttgcagaagagtacagtgtcacgtgtgtgcttaaggatgcccggacagttaccatgcctgcgggagaccatccttatgtgaacctgtccggaaatgcatctatggccaaggccggttcaggtgatgtgctcgccggtataattgccggtctgctcgcgcagggactggatctgacagacgccgcagtgcttgggacatatcttcacggcagggcgggagaactggcaagccgtgacaaggggagttacagtgtcatggcctctgacctgatcgaatacacagggagagccatgcaggaagaggaggacagatagatgaaagcgtataacagagtatgtgccaggatagacctggatgcagtggaatataatatagaaatgatgaagaacaacgtacgggacggcgcaaagatgctcggtgttgtcaagacagacggttacggacacggtgcggtacagatcgcaaagatgctctcgccgaaggattatatgtggggatttgcggttgccacacttgacgaggctgttgtccttcgccatggggggatcgaaaaaccgatcctcgttctcggatgcattttccccgatcagcgggaggatatgataaaacacgacatccgtatgactttgtacaccgaagaaatggcccgcgaagtgtctgagcttgcggtcaaaatgggaaagcaggcatatattcatattaagcttgatactggaatgtcaagacttgggttcctgatcgaggaagaagcggcggacatcatagagcgcatcagcaaaatgccgaatctcgtcatggagggcatgtatacacattttgcgaaagcggatgagatcgataagtctttcaccgggaagcagatcaggaactatgtgtggatgaaggaaacactcgaaaagagaggggtggccttcacgtattaccactgctccaacagtgcgggaatcatcgatgtcccggaggcgaacatggacctggtgcgggccggtatctctacttacggcctgtatccgtccgaagaagtacataaagaaaatgttccgcttaagccggccatggagcttatcagccatgtggcgcacgtcaaatgggtagatgcggggacgccggtaagctacggcggcacgtacattacagacaggagaacaaagatagccacgatcccggtagggtacggtgacggctatccgagaagtctctccaacaagggatatgtcctgatccacgggaaaaaggcacctattctcgggcgcgtgtgtatggaccagttcatggtcgacgcgacagagatagatgatgtaaagtatgcagataaagtgacactggtaggaaatgacggcggtgaaaagcttccggtggaagtcttaagcggactgtccggaagattcaactatgaattcgtgtgcgatctcggcaaaagaataccgagagagttcatccgtcacggtgaaatcgtggaacagatggattatttcgtataaatcacggtattactgcagctctatagaatacatttgaaaaagatggaaatactaattttatcttaagtaaatggagtgtgaaatagagtgcaggttagacgtggagatatatattatgcggacttaagtccggtagtcggatcagaacagggcggcatcaggcctgtattgataatacagaacgatatagggaacaaacacagccctacggtcatctgtgccgccatcacatcaaagatgaacaaggcgaagctgccgacacacgtggagatcgatgcgaaaaaataccagatagtgaaaaattcagtcatattgctggaacaggtgaggacaattgacaaacagaggctcaaagaccttgtctgccaccttgacaaacaaataatgaacaaagtagatgaggcgctgaagatcagcttcgagcttcatacatagtaaaaggagtttagaaaaacagttatggaagaaggcagtttgtttcagagaatgaaacagatatttcagatcaaagaggatgttgaagacgaaggtgtctggaaagaagcggcggaattgatccgcaatatattccgttatatggataaagacgcaaaggacattatgacacacagaaaaaatatcgtggctatcgacggaaatgaaaagctcgcggatgccctcaggttcatgcttgatgagagctattcccgttttccgatatatgaggagggcattgacgagatcatcggcacgatacatctccgggaggcgatgacctgctattttaacgaagacctgcgccagatgccggtcaagcagcttgacgactacataaggccggtggcgtttattccggagacaaaaagtattgataccttatttaaagagatgcaggcggagaaaaatcacatcgcgatcgtgctggatgaatacgggcagacatccggacttgtggctatggaagatattctggaagagatcgtcggcaatattcttgacgaatatgacgaagaagaagagctgatcgagatacttccggacggcagctgtattgcgagtggtatgacagatctggaggatctggaagatatgctgccgatgacatttgaaaaagaagaatacgagacactcaacggtttccttgttgaccagctggacaggatcccgtctgaggaggagacatgcatcgtggaatacgatggataccggttcactgttctttccgtagataataatacgatcgaaagagttaagattgaaaaactaaacgaagagtgctagaatagaaaaagtgcgggaaacagcgaaaagataaggtataaggagagatttagaacatgtcaggacattcaaaatttgcaaatatcaagcataagaaagaaaaaaatgatgccgccaagggcaagattttcaccaagatcggtaaggaacttgccgtggcggtaaaagaaggcggaagcgccgacccggcaaacaacagccgtctgcgtgacgtcatagcaaaggctaaggcaaacaacatgccgaacgacacgatcgacaggaatatcaagaaggcggacggagacgcaaacgccgccaattacgaatatattacatacgaaggctacgggccgaacggaacagctattatcgttgaggcgctcaccgacaaccggaacagaactgctacaaacgtaaagaacgcatttacgaaaggaagcggcaacgtcggaacaccgggatgcgtgtcctttatgtttgacaaaaagggacagatcatcgtgtcaaaagaggaatatgaaggcgatgcggacgacctgatgatgcaggcgctcgatgccggggcggaagatttcgcggaagaagaggacagctatgagatcgtcaccacgccggaggacttcagtacagtcaggctggcgctcgaagaggccggcattcccatggcggcggcggaagtgacgatgattccgcagacatacgtggaactcactgatctgaaagacatccagaatatccagaagactctggacatgctcgacgatgacgacgacgtacaagacgtataccataactgggacgaatgatagacgaagtctgtgcgggggcgaaggataatgcgctgctgtgcagacaatggaggagacatatggaacagacgaagcaggaattgatccagctctttgaagagatgctgacgcagatcaaacattttaaacgcaagacatacgaaggcatatttaaagactgttatgacaagtataaaggtacggtggcggccgtcgcccggctgtgcgaggaagcgccggaggatgagagggaagcggtggcggcggaacttgcgcttgtcattccggactatgcttttgaaaaaatgcaggcattgtcaaagggaaagaaggaacggttttctgtagactacaatatgaacatggcagtctacgtcgtgccgatgcttacatacacacataacgaatactgtgaaaagatcgcctccaaaatggtggaagcctggaatgaaaagggtgtcacaacgctcacactcgggcagtcgagttatgatgatatcgcggggggctttaaaaaaggcttctgctttatcacaacagcggtctgtgaacagcaggacaagccggacgactgttatgagctcaggacactccgcgcctacagagatgattatatgatgagtacagaggacgggaaagctctcgtggaagagtattatgacatagcgcccggtatcgtgcagatcatcaatatgcagaaagacgcagaacatatatatgaagcactgtacagagactgccttgccccgtgtatcagctgtatcgaggcaggggaaaaagaacggtgcaaagagctgtacacgcgtatggtccgcggcttacagaaaaaatatttatattcataggaggacttgtatgagcaattataaaatggaaacaaaatgtatccagtcaggataccagcctggaaacggagagcctagaattcttccgatctaccagagcacgacgtttaagtatgacaacagcgagcagatgggacgtctgtttgatctggaggaatccggctatttctatacaagacttcagaatccgaccaatgacgccgtggcggctaaaatctgtgatatggagggcggtgtggccgcgatgctcacatcttccggtcaggcggccagtttctatgccatcatgaatatcgtggaggcgggggaccatatcgtatgcgcgtcagcgctttacggaggtacatataatctgtatgcccacacgatcagaaagatgggtgtggaggctacgtttgtagatccggattgtacggaagaagaactgaacggggcgttccgggacaatacgaaagccgttttcggggagacgatcgccaatcctgcgcttgtagtccttgatcttgaaaagtttgcgaaggcggctcacacacacggagtgccgtttatcgttgacaatacatttgccacgccggtcaactgccgcccgttcgagtggggagcggatatcgtcacacactctacgacgaagtatatggacggacatgcgacaagtgtgggaggggccatcgtggacagcggtaattttgactgggaagcacatgccgggaagttcccggggcttacgactcctgatgagacttatcacggcatcgtctacaccgaacgctttggcaaaggcgcatatatcacaaaagcgaccgctcagctcatgagagacctcggttcgatccaggcgccgcagaatgcctttttgcttaacatcggtcttgagacgctggcgctgcgcatggaacgccactgccaaaatgcgctggcggctgcaatgtatcttaagaaccatgaaaaagtcgcatgggtaagctgcccggcgctgccgggtgacaaatattatgatctggcgcagaagtatatgccggacggtacatgcggcgttatcacgttcggactgaaaaagggaagagacgcggccgtgaggatgatggacagtctcaagatgatcgcgatcgtgacacatgtggcggatgcgagaagctgcgttcttcacccggcgagccatacccaccgccagatgaatgaacaggagcttctggaagctggcgtccagccggatctgatccggttcagcgtgggaatagaaaatatcgatgacattaccgcagatttggaacaggcattaatgcaagtataaaatatgcaaaacaccttcatactattaaaaatggtatggaggtgttttttacatggcagatcaagagaaagaagaacagaaaaataatgagataaaagagatgggaagcataaacctggatgaaaacaaaagcagccaccggatcaagcttctgacgatcatcggagagatcgagggccacgaggcggtatcaggcaatacaaaggccacaaaatacgaacatttactgccgatgcttgccgaggtggaggacagtgaggagatagaaggcatgctcattctgctgaatacgcttggcggagatgttgaggcaggactctctatagcggagatgatcgcatcactgagcaagccgaccgtgtcgctcgtactgggaggaagccactcgatcggcggtcctctggcagtgtccgcacagtattcatttatcgtgccgagcggaacgatgatcatacatccggtacgttccagcggtatgttcataggggtagaacaaagcctgcgcaatatgctgcgcacacaggacagaataacccgtttcctttccaaacattccaatatgagccaggaacgcattgagaagctcatgctgaatccgacagaactcgtaaaagacgtaggcacgctgctggaaggcgaggacgctgtgaaggaagggcttatagatgaagtcggcggtatgagccaggcgttgcataaattgcacgaaatgatagacggggaacggcagaaaaagcataaaaatatgtaatgacagccctttttaaagatgctatactatatatagtatgtgccaataaataagggggaaatagtatggctgcaaagtcaaaaaaaaggaagagtacgcggcagacaaagaagaaaaataatgagcagagctttgtgagggatgagatcatcatttggtccgcgcttgccgtcagcatcctgattctgatcagtaattttggaatgggcggatttgtgggagcggccatttcgtcatttcttatagatgtatttggatgggcggcatatgtgatcccatttgtattgtttggatttgttgcctttattgtgtccaataaaggcaatttttccgcgtatatgaaagcagcggccgggttagtgctgctcgttctcgtatgtatgctgctccacctgatcgacggccgcggcggagacctcggagaggttctcgcgggagcgctcgtgccggccatcggaacagcaggtacatatgtggtggatatcattctcatcatcatctgcctcgtgatcatcacgggaaagtcggcgctgaaaggcgtgaaaaagcacagtgataaggcatatgacaaggcaaagaaagatgcacagagaagacgggagcaggcagaagagagaaaggctgaaagggaaacgagacgcgatgcgcgccgggaggataaaaagcggacagcccaccatgtagaaggagtatcgtttgataccactattgcgaaaaaatctccggaattaaaagagctgacagccgccccgccggatctctctgttcaggagaagacagaagaaccacagtttgtcattaaccgcggtgagatgccaaggatggctgaagtacaggaagagcaggttcctgaggcagaggaagaaccggctatacctgtaagatctgcaaacgcggcgggaaaaggacaggacagggcaggcattgcggcagagacggccggagtggcagccagcgtggctgctgctgaggcgaggccgaagaaagcatataagtatccgcccatttcactgctcacgaaagggaagaagaattccggggagtcggacgccgctctgcgtgagacagcgatgaagctgcagcagacgctccagaacttcggggtcaacgtaacagtcacaaatgtaagctgcggtcctgcagtgacgcggtatgaacttcagccggaaatgggagtcaaagtgagcaagatcgtaggtctggcggacgatatcaagctcaacctggcggccgctgatattcgaatcgaagcgccgataccggggaaggcggctgtcgggatcgaggttccgaacaaggagaatgcggcggtcatgctcagagacctgctggaaaccgcggaatttaaaaacagcgcgtcaaagctttcatttgcggcgggaaaagatataggagggaaggcagtcgtaacagatattgccaggatgcctcatctgcttgtggcaggcgctacaggctccggaaagtctgtgtgcatcaacacacttattatgagcatattgtataaggcggctccggatgaggtgaaactgatcatggtggatcccaaggtcgttgagctgagtgtatataacggcatcccccacctgatgatcccggtcgtcacagacccgaagaaagcggccggcgccctgaactgggcggtggctgagatggagcgccggtacaaggcatttgcggaatataacgtgcgtgatatcaaaggatataatgataaagtaccggagatgccggagatagaaggcaggaagcctgagaagatgcctcagatcgtgatcatcgtggacgagctggctgatctgatgatggtggcgcccggagaggtggaggaggcgatctgccgtcttgcacagctggcgagagcggcggggatccatcttgtcatagcgacgcagaggccgtctgtcaacgttatcacagggctgataaaggcaaacatgccttccaggatcgcattttccgtgtcctccggtgtggattccaggacgatcatagatatgaacggcgcggagaagctgctcgggaaaggggatatgcttttttatccgtccggataccagaagcctgccagggtgcagggagcctttgtatcagacaaggaagtgcagagcgtcgtagagtacctgaaggatcacaacggagatgctacatacagtgaagagatagaaaatcacgtaaatacgagtgcggccggcggaactgccggacctggctcagcggacggtgaggaacgagatctgtattttgcagatgcgggacgcctcattatagagaaagagaaagcatccatcggcatgctgcagcggacgtttaagatcggattcaaccgggccgcccggatcatggaccagctgtgcgaagctggtgttgtgggcggtgaagaagggacaaaaccgagaaagatacttatgacggccgaagagtttgaacgctatatggaagaataagcctgaagaatcagaggaaaggaaagggttgacaaatgaaaacagatattcagattgcacaggaagcagaaatggcgcacatcaaagaggttgcggcccaggttggaattgaggaagatgagcttgagttctacggaaagtataaagcgaaactgtccgacgatgtgtgggagaagataaaggacaggccggacggaaagcttgttctcgtcacagccataaacccgacgcctgccggtgaaggaaaaacaacgacgacggtaggtcttggagaagcgatggccaggctggataaaaaagcaatcatcgcactcagagaaccgtctcttggcccgtgtttcgggatcaagggcggggcggccggcggaggatatgcacaggtcgtgcctatggaagatttgaatctgcattttaccggagattttcacgcgatcacttctgcgaataatctgctggctgctcttctggacaatcacatccagcagggtaatgcgctccagatcgatccgagacaggtcgtctggaagagatgcctggacatgaatgacagaaatcttcgcaatatcgtggtgggactcggcagcaaaatggacggaatggtgcgggaagatcatttcgtgatcacggtggcgtctgagatcatggcgatcctctgtctggcggacgacattcacgacctgaagaaaaggcttggaaggatcatcgtggcttatgattttgcgggggaaccggtcacagcagatgatctggaggcgaccggcgccatgaccgcgcttttgaaggatgcgatcaaaccgaatctgatccagacgctggagcatacgccggcgcttgtgcacggaggaccttttgccaacatcgctcacggatgtaacagtgtgcgggcgacgaagatggcgctgaaactgagcgatatcacgataacagaggcaggcttcggcgcggatctcggcgcggaaaaatttctggatatcaagtgcagaaaagcaggatttaaaccagacgcggtagttttggttgcaactgtgcgcgctttgaagtataatggtggagttgctaaaaatgatttgtcaaaagagaatatagaagccctgaaaaggggaatcgtaaatcttgagaaacatatagagaatattcagaaatatgatattcctgtggttgtcaccctgaattcctttatcacagatacggatgccgagaatgagttcatccggaagttctgcgagcaaaagggctgtgagttcgcactgtcagaagtgtgggagaagggtggagaaggcggcgtcgcgctggcagaaaaggtgctggatacgctggagaataaagagagcaacttccatacgctgtacgaagatgagctgtcactggaagagaagatcgagacgatatcacgggaaatctacggagcacgtggtgttgtatacgaaccggccgcccagaagcagcttgcgaagatcgcgtcgatgggatttgggaatctgccggtctgcatggcaaagaaccagtattccctttctgacgatgccaaaaagcttggacgtccgacggatttcgacattcatatcagggaagtctatgtaagcgcaggcgctggtttcgtggtcgcactcacaggagcggtgatgacgatgcccgggcttccgaaggtgccggcggcaaacggcatcgatgtatctgaatcaggcagtataacaggattattctaaggagatatgtaatatggccatgttaattgacgggaaagcaatttccgcacagataaaggaggaactgaagaaggagaccgcactgcttgcagaagagggcaggcgcgtctgtcttgcggtcgtacaggtcggcggtgatccggcttcgtccatctatgtcgggaataagaaaaaggcatgtgatcaggttgggatcgaatcactgtcatatgagcttgaggagcagacttctgaagcagagctgctgtccctgatcgacaggctgaaccgggatgataaggtgaacgggattctcgttcagcttccgctgccggggcatatcaacgaagatgccgtgatccgtgccatacatccggacaaggatgtggatgggtttcacccggagagtgtgggaaggctctgcatcggagagaagggctttgtcccctgcacaccggcggggatcatccagatgctgaagcggtccggtattgagatcgaggggaaggagtgcgtcgtcgtaggcaggagcaatatcgtgggcaagcctatggccatgcttctgctgcgggaaaatggaaccgtcacagtggcacactctagaacaaaacagttgagggaagtgacaaagagggcagatattctggtcgctgcagtcgggaaaccgaagtttataacggcagaatatataaaagaaggggcagtcgtcgttgatgtcggaatacacaggaatgagaataacaaactgtgcggagatgtggactttgacggcgtaaaagagaaagcggcggcaatcacaccagttccaggaggagttgggccgatgacaatagccatgctaatgagcaattgtgttgaggctgcaaggaagtaggaggttaacgtaaagatgaaatgtaggtattgcgggcacgaaataccggagggtatgttatattgcggggagtgcggaaaggaagtacgtattgttcccgactataatcctttagatgatatgctcacggcacagataaaggtgtctatcaatgaggaagacggcgctttatctggaagtgattacgatatgtttacgggagacatacccgcaaggcgcagaaatacaggcgccgggcggaatacaaacgcaaggcggaacacaaataccggaagaaataccggaagaagctctgtgggcagaaacacggggcgcaatacaggcagaaatacgacaggcagaatgatgtcagagaaagaacagcgcagaagacagatggaacggcggaaagccctgaaacggaaaaagcgcaggaaggttcttatcattctggctgtacttgtcgttgccgctgtggcggtcggagtcgtatgctatcagaattcttacaacggcattataaataaaggttacagcgcgcagaaggaaaaagcttacgagaaggcggagacttattttaagaaggccatctcaaagaagccggaaaaagcagaggcatatacgggactgtccaaagtatatatcgcccaggacgatctggagaaggcggaggacgtatttttgaatgccatcgataagcagacgaaaaatgcggacctctatgaagcgtgtgtaagtttttatatggacacagaccagaagatggagattcccgtacttcttgaggatgtggatgacagcgtggcagaaaggctgggcgggttcatcatagacggtccgtccttcagtctggacgacaaggagacgtacgaggaagtacaggaacttacgcttaagtctgacgaggcggcaatttattacacgacagacggaagcgaaccgagtacgaaaagtgagaagtacaaagaaccgatccagcttggcgaaggcgaaaacattatcacggccatagccgtgaacaaagagggtgtgccgagtcttccggtgaagaagacatttaccattgaactgccggtagaggacgcccctgccgtatctccgtccacgggccagtacgatacggccgcgcagatagagatcaaagtgcctgacggttatgaggcctactatacgatggataagagcgatccgactaccgcctccacaaaatatgagggaccgatcgacatgccgcagggcgagacaatattcaaggctgttcttgttaacgccaaaggacggatgagcgggatcacaacgagaaattatatgtacgaaccagaataaattgtcagaaaatataaagaattttgaaaggggtcagacccctccgcttgcgggggtctgacccctttcaaaattcatcgaattgtacgtaaataaatacaaaattttcctattattctattgcgttaattatttaacaggattataatatctatatattgataaattattaacaaataattcaaaaggagatgcggaaaatgagcagatttacattaccaagagacgtatatcatggaaaaggctgtatggaggagttgaagaatctaaagggcaaaaaggcgatccttgtcgtgggcggaggttccatgaagcgtcagggctttctggacaaagctgccggatatctgaaggaagcgggtatggaggttgagctgtttgaaggcgtcgagcctgacccatctgtggagactgtaatgaaaggcgcagaggcgatgcgcaagtttgagcctgactggatcgtggccatgggcggaggttcaccgatcgacgccgctaaggcgatgtgggcattttatgaatatccggaaacaacatttgaggatctgtgcatcccgtttaacttcccggaattgaggcagaaggcaaaatttgctgcgattccgtctacatccggtactgcgactgaggttacggctttttctgtcatcacaaactatgagaccggagtgaaatatccgcttgcggactttaacatcacgccggatgttgcgatcgttgaccctgagctggtagaagcacttccggtaaagcaggtggcttacacaggtatggacgcactgacgcatgcgatagaagcatatgtctctacacttaactgtgcatttaccgacccgcttgccctgcaggccatagagatggtactcgatcatctgccggcttcctatcacggcaatatggatgcaagagaacagatgcactatgcacagtgcctcgcaggaatggccttctcaaatgctttgcttggtattgtacattctatggcgcacaaaactggcgcggcattttccaccggtcatatcacacacggatgtgccaatgcaatgtatctgccatacgtgatcaaatacaatgcaaaagatgccacagcagcatcccgctatgctgagatcgcccgcaggatgggacttgacggtacgtcggaaagagcgcttatcaacagcctctgcaagaagatagacgctatgaacgcagaatttgacattccgaaaacgttaaaagattttgggatcatagagaatgaatttaaagaaaagatcgcaaagatctctgaacttgccgtcggcgatgcatgtaccggctccaacccacgttcgatagacccggctgccatggaaaaattatttacgtgcatttattacggaacagaagttgatttttaataatctaacatataaaaacaggtgccgtaaagcgcctgttttttagtggttaatatttggctttgcggaaaataagttacttgatattttgtaatatatgcattattatggaataagtattaaatattaggaggaaatgagatgtacaagatattaaaagccgaaaatccggctgataagatttatcttatggacgtagaagcgccccgtgtcgcgagacattgtgagccaggccagtttgtcatcgtaaaaatggatgaaaaaggggaaagaatcccacttacgatatgtgactatgacagagaagcaggtacgatcacgatcgtattccagacggtcggcgcgtccacagaaaagatggccggactgaaagccggagattatttcagagatttcacaggccctctcggctgtccgtctgaattcattcacgaggacattgagagcctgaagaataaaaagatgctgttcgttggcggcggtgtcggcgccgcgcctgtatatcctcaggtcaaatggcttcatgagcacggagtggatgtggatgtcatcgtaggttccaagacaaaagacatgcttattctggaagacgagatggaatctgtggcgggtaattattatccttgtacagatgacggtacatacggccatgcgggtatggtcaccacgaagatagaaaagctggtggaagaaggaaataaatatgacgtctgcgtggcgatcggaccgatgatcatgatgaagttcgtctgtctgctgacgaagaagctcgggatcccgactatcgtgagcatgaacccgataatggtagacgggaccggaatgtgcggggcgtgccgtctccatgttggggaagacattaaattcgcgtgtgttgacggtccggaatttgacggacaccttgtcaactttgacgaggcaatgaagagacagcagatgtacaaaactcaggagggacgtgcgctgctgaaaatacaagaaggcgacacccatcacggcggatgtggcaactgcggaggtgacaactaatggctgatgtattaaagaaagttcctgtgagagagcaggaggcaaaagtaagagcggcaaactttgaagaagtctgctatggatataataaagaggaggcaatggaagaagctgtccgctgtctgaactgtaaaaacgcaaagtgtatccagggctgtccggttgcgatcaatatccccggatttatctcaaaagtaaaagaaggggacattgagggcgcctacaaggtgatcggagaatcctcagcgcttccggccatctgcggacgtgtgtgcccgcaggaatcccagtgtgagtgcaagtgtatccgcgggatcaaaggggaaccggtatctatcggaaagctggagcgttttgttgccgattatgcgctggaacatgatatcaaacctcagaaggctgagaagatgaacggacataaggtggccgtcatcggttccggaccgtccgggcttacgtgcgcaggcgatctggcaaagcttggatatgatgtcactgtatttgaggcgcttcacgaactgggaggagttcttgtatacggtattccggagttccgtcttccgaaagaaaaggtcgtaaagaaagagatcgagaaggtaaaagagcttggagtaaaattcgagacaaatgttgtgatcggtaaatcaacaacgatcgaccagctgatggaagaggaagaattcgaggcagtatttatcggttccggcgcagggcttccaatgttcatggggataccgggagagacggcgaacggtgtgttctccgcaaatgaatacctgacgagaagcaatctgatgaaagcatttgatgacaactatgacactccgatcgcggccggtaagaaggttgctgtcgtaggcggcggcaacgtggcgatggacgctgcgaggaccgcacttcgtctcggcgctgaagtacatatcgtttacagaagaagtgaggctgaacttccggccagagtggaagaagtacaccatgcaatggaagaaggcatcatcttcaatctgctcaccaatccgaaagagatccttgtagatgaaaacggatgggtacgcggcatgagagtcataaagatggagctcggcgagcctgacgcttccggaagaagacgcccggtagagatcccgggttctgagtatgagattgaactcgatacagttatcatgtcacttggaacctctccaaatccattgatcgcgtccacgacaaaaggtctggagacaaacaggagaaaatgtatcgtggcagaggaagagaacgggcagacatccaaagcgtgtgtatacgcgggaggagacgccgttaccggagcagctacggttatacttgccatgggcgccggaaaagcaggtgcaaaagggatacatgaactgctcagcagtaaatagacacatatatacagaaccgcagccttacaatgtgctgcggttcttttcctgtaccgtggatctccggctcaattttaccctataccgcagtcggcggatatggtatgataatgaggaaatttacaatacatgaaagaagggtttatatatatgactatattttggggcttaatgataccatttatcggcacgacggcaggagcagcgtgcgtactgtttatgcgcagggaactgaaaccattgatccagaaagcgctgctcggatttgcggcaggcgtcatggtcgccgcttctgtctggtcgcttctcataccggcgatggatatgtcagaggacatgggaaaattcgccttcatgcccgcagcggttggctttattatcggcatcgcgtttttgctgtttctggacaaggcgatcccacatctgcatatcggatgtgacgagtctgaaggaccgaagtgtacactgaaaaaatccaccatgcttgtgctggcggtcaccatacataatataccggaaggtatatcaagtggtgccgtgtttgcagggctgctcacaaataatgccaatgtaacagttgcgggggcgtttgccctgtccatcggtatcgcgatccagaacctgcccgaaggctttatcgtatccctgccgattcggagtgagggaaacggaagaggaaaggcgttcctctatggaaccttatccggcgtcgtggagccgatcgcgggagggatcacggtccttctggccgcttacatcacgccgatactgccgtatctgctggcgttcgcagccggtgccatgatatatgttgttgtggaggaattgatccctgagtctgcggaagggagccacagcaatatcggcacagtaggttttgcgttgggtttcgtcctgatgatggtgctggatgtcgcattgggatagtgtcccggtgatatgacggcgtgtgaatgtgttatttgagggaagggaaaaagagaaaatgaatattacgattcttgccgtaggtaaagtaaaagagtcattttaccgacaggcggtagaagaattcaaaaagcggctgagccgctactgcaggctgcagatcgttgaggtacaggacgagaagacgccggacaatgccggggatgcgctggagcgccagatcaaggcaaaggaggccgcgcggttgcagaagtatataaaggacacggattatgtggtaacgctggagatcgagggacagcagccggattctgtcgcgctggcggacaaacttcaaagactcggcgttgacgggacgagcagtattgtatttgtcataggcggttctctcggtctccatgaagatattacaaagcgttcaaattacaggctcagcttttccaacatgacatttccgcaccagatgatgcgggtgattctgctggagcagatataccggagttaccggatcataaatggggaaccgtatcacaaataaaggcgtttttatactaactagaaacttgatatacagtaggtaaggaaattatgaagtacatatacattattataattatagtttttattgtattattttatttagctaatttttcaaagaatactcaggttatttatgtgaaaaaacgtataaaaaagaatttttccattaatactttgctcttaactacttgcctatttggtatattatctgcttttttcgcttggcaaaatattctaatatccaacagggacacgtcaccactattacattttgtaaaagaatcaggaaaaaatgaaaattattatttggaaaatgataagggagttgtgtcctatgttactatcaacaaaaatttgacatttaattttatttatgaaaacgaaccatatcaaataagagtagctgttagcaatcaaaatgattcggtggaaaagggatgtaaaaataaatggtattataaaccaactgttttaggattaaatactgaagattctattggtttcataaaagatactttaaaggataaaacaggagaagatttgattgtttctggtactgttgattttgaggtgagttttttcgactataaaaatgataaatttaattttatctatacagaatatgataataatattactttgactagtacagaaggttatatgcattatcctgaaaaaaatattactacttttttatggtcagaagaaaacattgagagtacaatagaatctctaatagatagtatattaatagaaaactctgcttactaacgttacgggcacgcaattaatggctttcacgactatttaaagttgtgtgtgcaggactctgtcatcaaacaggataaaatcaagaatatatttttgaccgtatctttgaaggcataaatcacttgactctggaggatattttttcatttgtcattccgacaatataatcaatactaacaccgtagaaatcagatagtataataagaaagtcaacaggaatcacattacatctgagaattctaacgaggactctgattattattacaaacaatagttattgatttgccggataactcacagcggcctgcttttaaatacagagataggcaagcagctgtgagatggctgttacctcttacatatcggtctgatatacttccagaatttctccgggttgtgataaaaatagattattctgccgggagaagtatcatagcagtaacctgtgccttcaaagtcgaagtctgccattgccttctccactttttcttctacgctgcggttttcctgttcataatcaaaaggcccgtgttcaaagacgatatactcagcttcggggatatcgaccataagcatctgcgcaggcacttcacctttatgatcagccggaagccgcgctccataacattcggtccgcaaaattccccaatcgcagagcctgccgtccgggtcgttgatgtatgccatcacctgtccgtttccgctgttggaatcgctccccccgtcgtcatccaatttgcccttgatgctgtcgagcagaccgcagatcgtttcgatgtcctgccccggaatctgattctgtttctgccagaaatcccaatatccattgctttcatagtttttgatgtgcagaaatttgtgtgctggaatcgttacgaaataaattttgacatcatctgtagattttatcatgccaatctctcctaatcctaaaaagtaacggtcaaaaggatttatttttgtgcgaagtacgacaggctttggatttttccggtattcgcttggcgttaccccatatgttcctttaaaagctcttgtaaaagcttcatgtgaagaaaaaccatagtcaaaagcaatatccagaatacttttttcgctgtcccggatctctttcagcgcaaaagccagttttctcagtctaagatagtctctgaactggattcccaaaatctctttgaatttcctcgttgtatagaattcggaataaccgagtctgcgggaaagaaagcgaagtgttaagtcctcgccgttataattcttaatgcagctgtcgatctcatcgacgatcatctgaatttgtttctgccattcgtacattcgtctgttccctccgtttcaaccgttcttcccttattataaataaagacagagagtgccgcttgatcttacttgctgtaattattttaccgaatcccgtggtcatgtgtccggacgccagaatgattataccacgcagccggaacttcacggataatattttaacgctgcgccatcggaattatttcgcgatttaaggattttttaataatctgtccgttatactgtttacaacggacaggggcagaaaatggagacagctgctgttccacaaaaggaaaggaaacttgttatgatacgaaacatattaaaaaaagatatgaggcggagaaaaagcgtgaatataattctttttcttttcatcactatggcaactgtatttctggccagcagtttcaataatatcctcgtcgtaacctcttctgtagagtattatatggattatgccaatgtgcctgatgtcaacctcattgtaattggtgacagcgagaggacagagattgaaagctggatcaaaaagaacggaccaggcgtaaaagaatacgattacaatacgctgatggctctcattaataaaaatatcaccgtagaaaaagacgggaaggacggaccgctcgactccggcggaggcggaatgtatctcggtacgacagacgccggatactgcagagtgtatgaccgaaacggagcgccttttgtattgaacgacaatgaggcggcggtaagcaaatccattatggagaggaacggcctcaaggaaggagatacggtaacagtacgtctgggagatgaaaacagagaatatcggatcaaggcagagacaaaagatgccgcgtttggaaacgagatggttggaatgagcaggattctcgtaaaccaggatgagtacgcacattttaccgataagaatgacagtgatatattcggcttatattatgtagatacggataaggtaaatccattcatcaaggaactgaacgatcagaactttggtacagtcatcaatgccataacaaaagatacatactccctcgtatattcttttgatatgatcatggcggcgctgctgatcctgatcggaatctgtctcatactgatagcgcttctgcttctgcggttcacacttgtatttacgatcgaggaggattacagggaaatcggcattatgaaggcaatcggtatgaaagaatctgccattcagaaaatttatctggcaaaatattttgtgctcgtgtgcgccggggctctgaccggatttgcggcaagtgttccggtgagcaggcagatggtggccggggtaagtaataacatgatcatggaagacagcagcgcaaatctgggcgtcaacattgtgtgcacactttcggtcgtgttctttgtactgcttttctgttataaatgtacgagcagagtaaataagatatcagccatagcagccatacggggcggacatacaggcgaaaattacaaaaggaaaagaggacttaccctgcatcttcggaaaaaactgcctgtgccggtttatctgggcctgaatgatatatgcagacagacgagaagatacctcatactcatgatcgctttctgtctcagctttattttgataacaattcccctaaatacgctcaatacgatgcgaagccgggagatggcggctaagttcgctattgatccggacagcgccgtgtatgtaggcggcatcgagcgtccgggagagagcagttacaagacgggacgggaacttgaaaaagggatgaagcgtgtggaggaggagctggcagagaaaggatatgatgcatccctcaccggacttccgatctactttttttcctacggggaacccggaaaaaaggggcggaataaaatcatgacggtccagacgcttggagagaacaataagtatatgacatatatagacggagaggcgcctgtactgcaaaacgagatcgctttttctcaaaaaataatggaggagaatggctgggagattggagacaaggtggagactgagatcggtggtgagaagttcagctttctcattacaggaacgtattctgattacatgcagcttggaaggagcgcccggttaaatccggacacagaccttagagacgaggcaatgttcggctggtggaatatcatggtggatatggagacggacaactcacaggccaagacggctgagatacttgaaaaagaactgcccggctacgactggtcaactgcccaggaagctgttgacagcaatgtaggaggaatacaggattcacttcacgatctggtaatgccgatgacagccatgctctgtggtgtgatcatgctgatcaccctgctgatggaacggcttttcatcgtgagggaaaaaggcgagatcgccatgatgaaaagtacgggattcagaaatggaagcataagatcgtggcaggtgctccgcatgacaggcgtagcgctcgtctccatggcagctgcagttccgctctctctcgccagcaaccagtgggtgctgaagcctatatttgcggtcatgggcgctgatgtggatatacaggtcgtgccatggcagatatacggcgtatatccgggtatacttctggcgggaataatagccgcgtcttatctggcggcagggaagatcaaaaaaatagatatcagggaattaaataacctggaataggaggaaagtaatatgagagccttgaatgtcagaaatctgtgtaaaacatatataaataacaaacgtcagatcaacgtgctcaggaacgttgatctggagatagaggaaggtgagatggtagggatcatgggcccctccggatcgggcaagacgacgctgctttatactgtgagcggaatggacagtgccactgccggaagcgtagagttcttcggccggaatatgtccggcctgacggcgggcgagatgagcgatctaaggcttacagagatgggatttgtgttccagcagatgtatatgctgaaaaatctctccatatatgataatattatcctgccggcatgccagtcgccggaaggaagaagcagagagggcagagagcgcatcaacgaccgtgcgaaagtattgatgcacaagcttggcatcagtgagatcgccggcaatgatatcaatgaggtatcgggcggacagcttcagagggcctgcatctgccggagccttataaactgtccgaagatcatttttgccgatgaacctaccggctcgctgaataaacagaattctatagaagtgatggaggagctgaaccacatccacgcggaaggaacgagtattctgctcgtgacgcacgacatgaaggtggcgtccagatgcagcagggttctgtatattgaagatggaaatataagggatgagatcgcgctcggcggatggaaggaaacagaagatcccagacaaagagagcgagttttgaatgactggctgatcaaattaggatggtaattgatggatgtacgatatattacttgttgaagataatgaagaactggccgggctgctgcgggactttctcgtggacagaggctacagtgtgctgcgtgccgcccgaggggatgatgccgtccggtatgcagaaagaggggaggtacgcctggtgcttctggatatcatgcttccgggtatggacggttttgccgtgtgcaggcagatacgtaagagtcagaacgtacctgttctcatcatgagcgcaaaatcgggaaagcagaataagcttacaggttatgaactcggggcggatgattatatggagaagcctgtggaccctgagattctaagtgcgaaagtgaatgcgctgcttaagcgttccggcagagcacaggaggaaatgctgctcgtatcgggggagatcacgctcaaccgcaaggcccggaccgtgaatctcaggggaaagtctctggaactgaatgtgaaggagtatgagttgctccttctgtttgtccgcaatccggggaaaacactccgtaaagagtatatttttggaaatgtatgggggacagacagcttcagtgaaagtcagacgctgactgtacacatcaagatgctgcgcgcgaagatcgaagaaaacccgagggaaccgaagcggattctgacagtctggggagtaggttacagatatgaagaaatttaatacagtcatcgcggcagcagtccttttttatcttctgacggccgctgcggcaggatacggaatacacaatgcggccacgggacaggaacaggtccataaaatagagatcaacaggatatacagcagtctgcgggatggagtcccacaggagaacatagacctgtccgaattccggtatgtgaaaggaatctcttatcttccggccggacagatggaggaagaagacatggctgcggcattctatgaagagaaaaatcatctgggcagccagatcatacctgtattcacagacggaagcctggaaggcttatggaggttcgactacgaaaaaccggttttccaggcggagaatattcttttgcttacggaagtatgtcttgggatcatgggggcggtccttatttctgtattgtgttatctgagatcacagctgatcgggccgtttctccgtctgaaaacgctgccgtacgagctggcaaacggacatctgtccggggaggtgccggaagaaaagagccggttcttcggagacttcttctgggggatgagccagttgaaggatatgctggctctgtcgaggaagagacggctggagcttgagaaggagaagaagacaatgctgctgtctctgtcccatgatatcaaaactccgcttcacgcgatccggctgtacggcagagccctggaggaggatctgtatcacggagaagcacagcgcagacatgccgcgcggcagatcggtgagaaggcttcggaaatcgagcggcatgtagaggaaatcatgagaaattccagagaagatattctggatatccatgtggacaacggggaattttatcaggcagaactggtcaaaaggatactggatacttatgaggaaaaatgcaagatccgtatggtggatctggaggttggcccgtatgacgatctgctgctgaaaggggatatggaacgaacgctggaagtgatcggcaatctgtttgaaaacgcgttcaagtatggagacggaagaagcatcacgcttaccttttatgaggaagattactgtcatctggtccgcgtgtacagcagcggcaacccggtgacggacaatgagttcaaccatatttttgaaagctttttcagagcctccaacagcagaggcctggaggggaacgggctgggtctctacatctgccgggagatcatgagaaagatggacggcgaaatattcgcccagaaggaggaagaaggtatggcgtttgttcttgtattccggtaagagggggcattgattccatatattgcatgttgcacagtcttatttttgtgttaggatataaaacgtaacaaatatgtaacatatttgtaataaatatcttgaccagaaggaggaggaaaatgaaaaacagaattttcattacattggctgcggcagcagtcgcgacaagtatggcagcgccggttgtatcacaggctgcggaaggaaacggacctgtcaggaaaggatacataatcgcagggaacggcagtagtgtcagcgtgaacgaggtcacgaacgaagagctcaagcagaagcttaacatagaagagatcataaacaaactctgtcccggcggcaccggaggcggacagaataagccggacaacaagcccgacaacagaccggacaacaacaagtcggacaacaacaagccggataacaacaaaccggacacaaatgttccggagacgccggataaaccggggactcccgaaaaaccggagacgccggatacaccggacggccagcctgaccagggcgaaaacagcggcaagtcatttgcggagcaggtagctgtgcttgtcaacaaggagagagcaaaggaaggtctcccagcgttgaagatggatgcttccgtatcaaaagccgctctcgtgcgcgcaaaagaaacggagctctctttttcgcatacaagacctgacggcagagggtttaacactgcacttaccgaacagggcgtaaaattccggggtgccggtgagaatatcgcgtggggacagaagtctccggaagaagtcatgaaaggctggatgaacagtccgggacacagagcgaatataatgaattccaaatatacaaccatcggagtcggatactaccagaacgcgaaggggacaaattactggacgcagctgttcacttattaatgcatatacgtatagaggaaaagggccgggagatatcagatgtatctcccggccctgcctgtatgccggcctgcgccgcctgcacgtacagctcagatcgaacaggaagagccaacatgatctcagcggcagtattcctccagaagagattcaaaaatatgaatgtgtatctcctcgtcctggatgattcgtttcagacattctacaatatgtatatcctttatcctgcggcactgctcttcatacttctgcactgttttccgttcgccgttgagcgcgtttgtgagcagaggacgaatctcgatcgggtagttgttgtaggaaggactccagtatgtcatctgatttcctctgtaagtccagagacggggattttctcccatcattctcgcgatctctccgaagatatgcaggtggtgcatttccacaatgcttatcttgtgaaaaataccggacaggcgcgcgtcttcgtcgatgagcaggttgttgtacacatacaggctcaccgcggacatctcggagttctggccgcccatattatcgagcatcattcttccgtatgctctgttgcgctcacagatacggaccggaggataaggccctgaagcggcgtacgaaggctcttttggcgcctgtggttttacgtcattacattcacattcacagttgcggtttagttcgttattcatataatacactccttttaatttaaggctgctgacaaaacaatctatgaataaagaatggaatatatacggatatttgaagaataaagacggcgccgggtggcaaaaaaatacacttagtggtatgatagaccgatacatgaaagttggaagaaaagaggaagcgcaaaacgtatgaagaagagaacttctgaaaaaacggtatttaaatggagatatctgctggctgtgatcatactttttatatcatatgtctttctcgggacggtgctgtcttacgtgagacagcccggtgtgagccgggcatatgagaaggaattcgacccaaaagactgttattgtgacgaagtgtcctgtgaccgggcgtgtgtgatagaggacaatgaaagggcgcttgaggagcggctcagaatgatcggacaggcgaaggaacgcatcatattatccacctttgatttccatgacgacagcagcggaaaggatgtgatagccgcgctcatcgacgctgcaaagcggggcgtggatataaagatacttgtagacggattttcggcgctgcagcagatggacggcagcgaatatttctatgccctctctactatggacaatgtggaaatcaggatatacaatagaattaacttactgacaccgtggaaaagtatggggcggcttcacgacaaatatgttatcgttgatgccggactgtacctgctcggcggcagaaatacatatgactattttctcggggacaacggatacaagaattatgacagggacgtactcgtatacagtcaggacccggaaaatgaggaaagttccatccatcagctggaagcatattttgaatccgtctggaacctggaagactgcaaagtatttcatgacgatgaggaggatgcgtcacggccggatacggtcaaggcgaaaagagaacttgaagggcgttaccgcaggctgctgcaacaatatccggcgatcggcgaaagtgcagactatgtaagtatgacttttgaagtcaataagatcacactgttgtctaatcctgtccacgtatactccaaagagccccgggtattttattcacttgtacagctcatgaaggagacagaggaagagatagacatacataccccctacatcatctgcaatgactggatgtatgactcactcgaagaggtatgtaaaggcggcggcaaagccgcgctcatgacgaactccgccgcaaataacggaaatccgttcggggcgtcagattatgtgaaaaacaagggaaggctgctggaaacaggcatcacggtatacgaatatgaaggcggtgtatcctaccacggaaagagtattacgataggagacgagctggcggtcgtcggttcgttcaacatggatatgcgcagcgcatatctggatacagaacttatgcttgtcattgacagtaaagaggtgaccggacagctgaaaggttatatgaaggagtatgaggcagattcggtcaaggtactggatgagaagcattatgaagtgccggaaggcgtcgagagacagaagatcagcggaaaaagagaattcagagtcaaagtcctggctttgttcaactggcttcgttttctcatgtaggcatgttgatggtcaggcggtcaggccaaagaggccggtcatcagggagggatacttatgaagaaggttttaaaagcagttgttgtcatcttactcgttattgccgccgtcatagccgcggcgctcatattactgacggtgagagaataccgtccggaggcggtggagactttgaagccggcggacggaaaagagacactgaaggcgggagatacatttaccgtgctcacatacaatacgggatatgcaggcctgagcagggacgaagacttctttatggacggcggggaaaaagtcatgccggacagccgggaactggtagagcataatctgaaagggataacgtcagttttaagagaacagaaggcagacgtatattttctgcaggaagtagatttggactccaagcgttcctatcatctgaatgaaaaggaatattacgaaaaggagctggggctgccgggaatattcgcatacaatttcaagtgtgattatgtgccgtatcctctgccgccgatcggtaaggtagaaagcggccttttgacaatgaccggcatcggcatgagcgaagcgtcccgcatatcgctgccggaatcttttacatggccggtcaagacgtgtaatctgaagcgctgcatgctggaaacaaggatccctgtcggcggcgggaacaaggaactcgtactcatcaattttcatctggaagcttacgacagcggggaaggaaagatcgcccagagcaaaatgctcgcccaaaagctggaggcagaatataaaaaaggaaattatgtcatcgcgggcggcgactttaaccagacgtttgaagacatggacaaatacccggtccacagccgggataactggacgccgggtgtggtcggcaaggatgatattccggaagggttttcctttgccgtctcagataatgcgccgacgtgccggctcttgaacgggccgtacagcggaaactatgaagattcacaggtgtacgtgcttgatgggtttatcgtatcagacaatgttggagtaaaagaattggagaatattgacacacaatttgaatatacagaccatcagcctgtcaggatggaagccgtattgatacagtagaagacagaaaaaaggagcagattataaatccgctccttttttctgtcttaataataccacaaaacagccggtttttcaagtcttgtaatgtgtcccgcccggtcctataatagacgactaaggcaaaggagggtgcagtatggacaacgagttatacgaacttctggcagtgaacagaaacagggaagaactggccgcgataaattctcgtaacgagaagataggggcacagttcggcctcagtcttacagcggaggaaacaaaagctttgatcgaggcaaaaaatgtaagtctcaaaaggcatcagagggtggaattcggcagagggatactggatcatattatgtttacgttttgtgattcacagtacatcagccgggagaattatgccgggacattgatgaagcttcaggatatcttctataagtttaaaaatgaagcgcaggacagactgacagacgaggaactgctcacgttcatgaaagagcagtttgaaggcgtctgctttggagatacggaatatctggagagaacctgccttgagcgctttgcggctgcagtgcgtgccggataccgcgggtatgaatcagacggaggtaaaggagagtatgagaggttaagctgtgagaaacggtgggacagtgaactgtatatggaggtgctaagagagttgttctgggaatagttttcagatgtgaaaagagtaaaggagagcgtatatatggaatataagatggaagaactcataccggtcactgctgtgctggcagagaagtacacgtcaaaagagagcagttctgtgacttatgagacggccaggatgcttttggaagcggtagtatattgtatagaagagccgggactgcccggttcatttgttccggcaaaacgtaagaggccggaagcgccggaggcttacgccagaggatataaaagagtgctggataaggtatacagcgcaaaagaaatctatgacaggctgacagaagcgtttgaagattatggatgcggcaattacagagataccatcatcaaaggtatgccccgcttttttctctattatgatgcaagattccagccgcacgatcatatccttacactggattaccctacggtcaaccattacggaaatctttgcggaatagatctcatttacgaatatctgtgtgacattgagacggagagcaggcttttaagctgcttcgagaccgctgctgtgaaggaactgcttggaaggacggaggaacgctttggcatccgatatatggagaatctgtgtgcgcttgtgctgctcaatgccatcggatgcgttattgcagagcgtccgctgcaaagcctgacgcttgcagacaatgagatcgaaaaaatccggcggtactttcaggaggatgacctgcagacggtcgggcaaaagacaggcgcatatatccggatcatcacggaggcaggcggatgtggggagatacaggattattttcaggttttgaggagagagtatgcgcttcgtatttttaacggtgtggaacaccggtcgcttggaggggtgtttatgtgaacgtctgccgcggggcgaataattccggggacaatgtataaaggacagctgccgctcatagattactataaaactatgtgtggcagtgtttttatgaaggcaagaaagaaagaacgcagacaggatatagaaagccagtcgtttaagaataaagttgcagaggcctccgagatgccaaaagacgtagtgcttggaatgcctgtactcaccataacggggcagctggagatgagcctggagaattacaggggcattctggaatataccgatgctctcgtccgcatacagacgaagatcgggcagatccgcatcggcggaaagaacctgcaggtcgcatattatacaaatgatgagatgaaagtgacagggcggatagagtccatagaatatcatcactaaagggggataaagatttgcttttatccatgattcggtatataaagggttatgtacagattcgggttatcggttattcggcagaacggtttttaaatgcctgcagccacagaggcatctacatatggggacttagaccgtcaaacggggcgtatgagatgtacatgtctgttgacggtttccgcaggttaaaaccgattatcaagaagaccggaacaagagtagtgatagtaaggcggttcggtcttcctttttttttacacagataccggaaaaggaagttgttttttatcggggcatttttaagtgttgcgctcatatacatattatctctttttatatgggatattgatatagagggaaacctttcgcagacagatgaaaatattctggaattccttcagacgaaagaagtagagcacggaatgaagaaatcaaatgtggactgtgccaggattgtaaaggatatccgaaaagaatacgacgggatcatctgggtgtccgcctccatacagggttccaggctgctcattcaggtgaaggagaatgaagactccctgcctgccgccgggggagatgaggagatagaagaaggagcgcacaaagagagcgcgaaaacagaagaggagcctcaggatattgtggccgaccgggactgcactataacggagatgatcacacggaaaggtataccggtggtgaaagaaggcgacgcggtcaaaaaaggagatattctcgtgtgcggcagggtgccggtgaacaatgacgcgggggagacgaccggctaccactacaacaggtcggacgccgacattaaaggcaagaccgttctgccatatgaacaggaacaggaccttacctatattgagaaggaattccctgctgtcacaagggaagagttgtatctcaaggtaggaaagtaccggttcgggcttgggagcagaaatcacgattatgaaaattatgaagtaacttcccatgaaaagcgttggaagatcggggaggaattctacctgccggtctccacgggtacccggacgatacagccgtatacgccgaagaagcacaaatacagtgagaaacagctgcagagcatactgagcgcgcggtttaacaagtattgtgaagatttagagaaaaaaggggtagaaattattgagaatgatgttaaaatatacacagggtccgaagaagccagagcgaaggggaatcttacggtcatcatgccgatagggacgccggcgccgacggaagttatcgatgtgccaaaagaaaaagagaatgaaacgacaggagaaaatatagatgggaatgatggagacagtcattgacataccggcagagcatgaacagaatgtgttcgggcagttcgacgcatttgccaaaaggatcgagcgcacgctgcacgtgacgcttatcgcgcgggacggcagcgtaaagatcatgggggaagcggttcagacagaacgggcaaagaaagtattggaacagcttacaggcctgtctgtgagaggcaatacgattcaggaacagaatgtcgattatacattatctctcgtgatggaggacagcgcggagagcgttgtggagatggataaggagctgatctgccatacactgcagggcaagccgatccgcccgaagacactgggacagaaaaaatacgtggatgccatacggcgtaagatgatcgtgttcggactcggtccggcaggcacaggaaagacgtatctggccatggcgatggcgatcactgcatttaagaacaatgaggtgggcaggatcatactgacgagacctgccattgaagcaggggagaagctcgggtttctgcccggcgacctgcagagtaagatagacccatacctgagaccgctgtatgacgcgctttatcagatcatgggagcagaaagctttttgaaaaattcggaaaaagggctgatcgaagtggctcctcttgcctatatgagggggcgcacgctcgacaatgcctttatcatacttgacgaagcgcagaatacgaccccggcccagatgaagatgtttctgacgaggatcggtttcggctccaaagtggtggttaccggagacgccacccagaaagacctgccgtccgggcaggtatccgggcttgacgtggccgtatccgtagtaaaacatatcgaggatatcagcgtctgccagctgacgagcagagatgttgtccgccatccgctcgtgcagaagatcgtcaaggcatacgaagactatgagagcagaggcagggcaaaaggaaaagaccgaaggagaaaatgagaagaatgacactttattttgaggaagaaggggagaccgttctgcctataccttgtgaagaactggcacgaaaggtggcagaggaggcgcttgactatacaggctgtccgtatgaggcacaggtgaacctgctgcttacgacaaacttacagattcaggaaatgaatgaagaattccggggaatagaccgtccgacggacgtactttcatttcctatggcagaatatgagcacccgggagatttcgggtgtcttaaggaacaggaagactgttttgatccggagtccggggaactgctcctcggcgatatcgtgatatcaaaagataaggtgatatcccaggcagaagagtttggacattctctcaaaagagaatacgcttttttaattgcacattctatgttacacttaactggatatgaccatatggaggagaaagaacgcctcgatatggaagcaaagcagagagagattctgaacagattaaatatattacgataaacggagcatgaagtatggctgaaaaacgcagaaaaaaagaagccaatttcctgatacaaggatctattcttgccattgcaggggtagttacaaagataattggtgttatatatcgtattccgctgcgcaatatcgcaggacaggaagggatgggctactacggcgtagccttttccatctatatcgtggcgcttaccctgacatcttacagccttccgctggctgtgtccaagctcgtgtcagcccgtgtcgcggtaggagaatataaaaatgcatacaaagtgttcaggggagcattgatgtttgccgtaatggcaggcggatttgtcgcgcttcttatcttttttggcgcaggctttatcgcgaacaatatcatgtctattgacatgagcgtatatgcgcttcgcgtgctggccccgtgtatactcatagcggcagtgctcggagtcatgcggggattcttccagggcatcggttccatggtgccgaccgccatctcacagatcatcgagcagatcgtaaacgcagtcatctctgtgacgggagcttacgtattgttcagcgtaggaaagggaatcgccaagacgagaggcaatgattcctatggtcctgcatacagcgcggccggaggcacactcggcactgtggcgggagcgctgacggcgctgctcttcgtagtgtttatcttcatggcctacaaaaaagtcttccggcggaagatgcgcagagacagaagccggcacaaagagtcgtacaaccggatatataaggtgctgttagtcacgatcgccccggtcatactgagcgccacggtctataacatctgtgatttcgtggacagcgccatgttcagtaatatcatggcagcgcagggggagaaaaagatcgtatatacgaagctgctcggaatactgaccggggactacacgacgctgatcaacgtgcccctttccattgcaagtgcgttcgcctcttcgctcataccgagtctcgttgcaacggcgcagacaggcagccgcaagcagatacatagcaagataaacatggtaacgcgcttcaacatgatgatcgccattccgtgcgcggttggttttctcgtactcgcaaagccgatactggacctgctgttttatggctcggacaatacgacttccgcatatatgctgcagcttggagcgatctctgtcgtgttcttctgtctgtccacagtgaccaattccgtgcttcagggtctggatgacatgatgacgccggtgaagaatgcggcaatatctcttgttattcatgttatctcactgtttttgttcatggttatcttcaaatggaacatttatgcggtgattttgagtaagatcgttttttccggcgctatctgcattctgaattcacatgcgctgcgcagccggataggatatgtacaggaacagaagaggacatttatcataccggccatttcagcggcggtcatgggcgtgattaccgttgtcgtacatctggtggtcgaactctttatcggcagtaaggccgcgactatactcgcgcttgtggcagcgcttatctcatacgggatcacacttatcttgctcggagggctgacggaggaagagatgctccaaatgccgaagggcgctgccatcgtgactgtctgccggaaattacatttgatccggggagagtacagataacacaaattaccactggaagtataaataattgaaaaacggccaatactgtacttaaaaaggagttgtccttatgaaaaataagtatggtattggcttttttgcggcggctattataacggtactggcagtgtccagtgcatatcagctcagttatcagaaagcaaaagaacgggcggaggcagagacaaagatcgaaaaagagcaggaaactgccaaagccagaacggagccttcggtgagaacagaaggttccgcactgaaggaggactgctattacctcatggaggtaaatggttatatcgtcgtctacttaagcgacaagaagaccccgtatgagtacacgaatatacagtacgatgagctcccggcggctgtgcgggaggagatacgcaacggcaaatatatagaggacacagaaacattgtacggcttcctggaaaattattcgagttagaaataagaagtagactttacacattttatagtgtattataaaattcgtaatttccatgatttcaggaaggacgaaagagaaatggatgaaaagaagatagcaagaatcaatgaactgtatcacaagtccaaggcggaagggcttacggaagctgagcggaaggagcagcaggttctgagaagggagtatgtagatgctttcaagcagaacctgcgcagccagctgaatcagatctcgatagaagaggcagacggaacgataacagatttgggtgagaaatttggcaaaaaaagaggaaattagacaggaaattctgaagaaaaggctggatatcagtccggtcgagtggcagaacggcacggagtccatcacaaaagaagtgacggcacatgcctggtttcgggaagcgacagatatttattgttatgtggactgcagaaaagaagcgggaacgaaactgataatagaagaggcatggaggcttggaaagactgtctgggtgccgagaactgcaggagaagagatggatttctatgagattcattcgtttacagagctttccaggggatgtttcggtgttctggaaccagagggaacaactgcggctgacggcagcgacggtctgatgatcatgccgggagtcgtttttgacgaacaccgcggacggcttggatacgggaagggatattacgaccgttacctcagtaagcatccgggtcttcacacgatagcggctgcgtttgacctgcagatcgtagatgaagtgccgcaggaagacgaggacgtaaggccccagctgatcataacggaaacgaggactatttagacgcggaaaggaaggatacggatgcagtttggactgccgaaagatcccatgctccttttgagcgtggtgaacacgaagataagagactattaccacacgctggacgcaatgtgtgaagatatgcagatagataaaaatacgattgtagatacattgaaagggatcgattatgaatacgatgaatccagacatcagtttgtctagtgagataccggagacggagcctcagagacaatactattacatagaaaaggcaaaacagtatgtgacggaaaaggcaagggagatcgcaaggccgcttaccttctgtgtaacgaccttcggctgccagatgaatgcccgcgattccgaaaaactgagggggatccttgagcgtatcggttatgaggaggctgcggaggacgaggcggattttgtcatctataacacgtgcacggtccgggagaacgcgaatacgagagtgtacgggagacttggacagctcaagccgcgaaagagcaggaatcctcatatgatgatcggactgtgcggctgcatgatgcaggagccggaagtggtggagaagctgaaaaagagctaccgctttgtcgatctggtcttcggtacacataacatttacaaatttgcagaactcattgtctcacgttttgagtcgggaggcatggtcatcgatatatggaaagatacggataagatcgtggaggatctgccgaacgagagaaaatattcgttcaagtccggcgtcaatatcatgtttggatgcaacaatttctgcagctactgcatcgtaccgtatgtgcggggaagagagcgcagccgtgctccggaggctattatccgggagatagaacatcttgttgaggacggtgtgaccgaagtcatgcttctcgggcagaatgtcaattcttacggcaagacactggatactccggtcacttttgcggcgctccttaaggaaattgaaaagatagagggccttgagcgcatccggtttatgacgtcacatccgaaggatctgtccgatgagctgatcgaagtgatgggcagttcgcacaagatatgcagacatcttcatctgcccgtacaatccggaagtacggacatcttaaaaaagatgaaccggcattatacaaaggaacagtatctggagctcgtgagaaagataagagaagcagtgcccggcatctcacttacgacggatatcatcgtcgggttcccgggagagacggaagaagactttcaggagacgctggatgtagtgcgcagagtccgttatgacagcgcgtttactttcatctattcaaagcgcacaggaacacctgcagccgtcatggaagagcaggttcccggggaggtcgtaaaagaccggttcgaccggctgctcggcgaagtccagtctatcgcgcgggaagtctgttctgtacatgaaggcagcgtacagcgcgcacttgtagagtcggtaagcgatcacgacagcacgcttgtcaccggaaggcttggcaataatctgctcgttcattttccgggcagcccggacctgatcgggacgtatgcggacgtggagctaacggaatgtaaaggtttttactatattggcaaagcatgccgataaagaaatatataccacccatattataagccagaaacgctcaaactataattaagaacatatagtgagggcgtttttacatgaagaaaatcagtgagtatttattttttatcagcgcgggaggctgtatttattatacatttgaagtcatattccgggggttttcacattggacgatgtttctgcttggaggcatctgcttcctgttttttgagatacagggcagaatggtacactgggaggacgctttgtggcttcagcttgtaagatgtatcgtatttgtcacatccatggaatttatcaccggcattatcgtgaacaaatggatgcgccttggggtgtgggattatacgggacagccgttccagctgttcgggcagatctgtcttccctttgtcgtcatcttttcgggactcagtgtgatcggcatcatcgtgagcggttatctgtcgcactggctctataacgaaccaaaaccacattttcatgtgctgtgatgagaattttaagtctttaatattttgaagattaatgatataattaaatgtaaaaatttagacaaaagaggagagaattgtggctgaattaacacccatgatgcagcagtacgtagatacgaaaaaagagtatcctgactgtatcttattttatagattaggcgatttttatgagatgttttttgaggatgcgctgacggcgtcgcgggagctggagatcacacttacaggaaagaactgcgggcttgaggaacgggcgcccatgtgcggcatcccgtaccacgctgtggacggttacctgaaccggctcgtatccaaagggtataaagtggccatctgcgaacagatggaagacccggcggccgcaaagggacttgtgaggcgcgaggtagtccgcatcgtaacgccagggacaaacctggatacgcaggcgctcgatgagacaaaaaataattatatcatgtgcgtcgtatatatcgcggaccgctacggtctgtcggtggcggatgtcacgacaggcgattattttgtgacagaacttgagacaagcgagaaattatttgacgagatctataaattcatgccctcagagcttatttgcaatgaggctttttatatgagcggtatggatatggacttgttgaaggaacggctcggcattgccatctacgccctcgatgcgtggtattttgacgacgcgctctgccagaggacgctgaaagaacattttaaagtgagttcgatggaaagcctcggtcttggggattatgactgcggggttatcggagcgggtgcgctgcttgcgtatctgacagagacacaaaagaccgatctgacgcatctgtcgaaactgaccggatacgccgccggaaagtatatgatgctggacagttctacaagaaggaacctggagctctgtgagacactgcgtgaaaagcagaagaggggttcccttctgtgggtgctggacaagacgaagacagccatgggagccagaacactgcgcaaatatatcgaacagccgctcatagacaaggaagagatagaacggcgtctcgacgcggtggaagaatttaaggaaggggcgatcgccagggaggagatccgggagtatctaagtccggtctacgatctggaacggcttgtctgcaagatcacatataagtccgccaacccgagggacttgactgcatttaagagttctcttgccatgctgccgcacatccgctgtatactcggcgatatgaagagcccccttctgcgggggctgtttgacagcctggatacgctggaagatctgtgcagtctcatcacagacgccattttggaagaaccaccgatcgccatgaaagagggcggcatcataagggaaggctacaacgaagaagtggaccgtctgcgggcggcaaagtcggacggaaaagaatggcttgcaaagctggaggaacaggagcgggaaaaaaccgggataaagaacctgcggatccgtttcaacaaagtgttcggctactatctggaagtcacgaactcattcaagaaccttgtgccggattattatacgagaaagcagacgcttgccaatgccgagcggtatatcattccggagctgaaagaactggaggatacgatcctcggcgcggaggacaagctttacgcgctggaatacgaactgtactgccaggtgcgcgacgagatcgcggcggagatcgtacggatccagacgacggccaaggcggtcgcgcagattgatgtctttacctcgctggcacttgtggcggagcgcaataattacgtgcggccgaaaataaatgagcgggggatcattgacatcaaggacggaagacatccggtcgtggagaagatgatcccgaacgatatgtttatcgccaatgatacgttcctgaatgacaggaaaaacaggatatccgtcatcacggggccaaatatggcaggaaagtctacatatatgcgtcagacggcgctcatcgtgcttatgtcacagatcggttccttcgtgcctgcttcctctgcggacgtggggcttgtggaccgtatatttacgagggtcggggcctcggatgacctcgcctccggacagagcacgttcatggtagagatgacggaggttgccaacattctgaggaatgccacgggcaggagccttcttatacttgatgagatcggccgggggaccagtacatttgacggcctcagtatagcctgggcggtgatcgaacatatcagcaacagccggctgctcggagcaaaaacattgtttgccacccactatcatgaactgacagagctggaaggcaagatcgacaatgtgaacaattactgtatcgcagtcaaggaaaagggcgacgacatcgtgtttctgcgcaagatcgtcaaaggcggggcagataaaagctacggcatacaggtggcaaagctcgcaggagtgccggatacggtgatcgagcgcgccaaggagatcgtggaagaactgagccacgcggacatcacagccagggtgaaggatatcgccgtaaacggccacgaggcaaagatcaagacgaaaaaatatgatgaggttgacctggcccagatgtcactgtttgatacggtgaaggatgatgatgtcatcgctgagatcaaaaatctggatgtgagcaacctgacgccgatcgacgcgctgaacacactgtatcagctgcagaacaaactgaaaaacaggtggtaagatgaataagatacaagtacttgaccaagttacaatagacaagatcgcggccggagaggtgatcgagcggccggcttccgtcgtaaaggaactggcggaaaacgccatagacgcgggcgcgacatccataactgtggagatcaaagaaggaggtatctcctttatccgtatcgcggacaacggctgcggcatcggaagggaagatgtgccgtccgcctttctgcggcattctacaagtaagatccgctctgtggaggatcttgtacatatcggttccctcggcttccggggagaagcgctctccagcatcgcggcagtttcgcaggtggagctggtgacgaagacaaaagccgacacgttcggtacaagctaccgcatcgcaggcggaaaagaggaagcgctggaagatacaggagcgccggacggaactacctttcttatccggcagctgttctataatactccggccagaaggaagtttttgaaaacgccgatgacggaggcgagccatgtgggagaactggtgacacggctggcgctttcccatccggagatctcgtttcagtttatcaataatggacagtcgaaagtccacacttcgggaaacggaagtctgaaggacgtcatttatcacgtgtacggcagagagatcgccgcgaacctgctcgccgtaaactacgagcgaaccgggatgaagatcaccgggtttctcggcaaaccgctcatatcaaggggcaaccgcaattttgaaaattattttatcaatggacggtatgtgaagagcaatatgatcgcgaaagccattgaagatgcgtataaggatttcaccatgcagcacaagtatccgtttgtcgtactgcatatggagattgacggggaacatattgatgtcaatgttcatccgacaaagatggaactgaggtttaacaatcagcaggatgtctataattctgtatatgaggcggtggacagaggacttcacgcggaggaaatgatccctcatgtggagctccctgagcctcccggaggggagacgccgcccgtgcgcccggcagagcaaaagccggagccgtcgccggagaaggagtatgcggcgcagagaccgctggtgaaggagccgatacagcaggcgcagccgatgcgggaaacgccccggcaggcgcagccggtaaaagagcagccggtacgggcagaggcaccgtctggaaagggaactgcgcagagagatgtgaattatttcctggaggagatgaagaagagagtacgctcctaccatgaacagaattcttctgcggaagtacaggataaaaatgccatatttaagccgggcatccaggctgaccggatacgggaggccgcagcgtacgccaaaacagacgcgaaagcagacgacgtgcagaggaacagcgccccgctcaaggagacagacagtgcagggaaacagatggagagcgggaccgcgaagcagatggatatgttcgaggaaaagtttcttgaccgtgaacggaaggcggaatacaagcttgtcggccaggtgtttgacacatactggatcgtggaattccatgacagcctctacattatcgatcagcacgcagcccatgagcgggtgctctatgagcgcacgctgaagaatatgaagacaagagaatttacgtcccagtatatcagtccgccgatcattcttgacttgacgatgcaggaggcagagcttctgactatgtacatggaacagtttacaaaagtcggttttgagatcgaagaattcggacaagattcctatgcggtgagggcggtgcccgataatctgttcagtattgccaagaaggaactgctcatggagatgatcgacagcctttctgacgagatcagccggacactttcaccggacctcatcgatgagaaagtggcatctatgtcatgcaaggctgcggtcaaggggaatatgaagctttcagcggctgaagtggacactctgataaacgagcttctcatgctggagaatccgtatcactgcccgcacgggcgtccgacgatcattgccatgacgaagcgggagctagaaaaaaagtttaaaaggatagtataaatatgaagaagccattagtggtactgacagggcctactgcggcgggcaagacaaaagcgtccatcgctctggcaaaagcgatcggcggagagatcatatccgccgattccatgcaggtgtataaatatatggatatcggttcggcgaagatacggcctgaggagatggaagggattccccactatcttgtagatgagctgatgccgtcggaggaattcaatgtagtccgttttcagaaaatggcaagacaggcggccgagtgcatttatgaaaaaggccggatccccattgttgtcggagggaccggcttttacatccaggcgctgctctatgatattgattttacagagacggaagcaggaacggacatccggaacagacttgccgggtacgcgcagagatacggggcggataagctgcatgaacggcttgccgaagtagatgaggcatcggctattaagatacatccgaacaatgtcaaacgggtcatacgggcgctggagtattatgaacagaccgggaagcggatctcagagcacaatgaacgggagcggatgaaggaatccccttacagcgcagtatactttgtgctgaccgatgacagggaaacgctctatgaccggatcaacaggcgggtggacaaaatgatggaggacggacttgtcggcgaggtgcgcaggctgagacagatggggtatacgaaagagcttgtctccatgcagggccttggatataaagaaatacttgactatcttgacggaagctgtacactggaagaagcggtctatacgataaaaagggatacaagacattttgccaaacggcagatcacatggtttaagagggagagagatgtgatctggatagacaagggggcgtacggacatgatgaagaaaaaattctgcacgcgatgataaagcatttggagggagtactatgtttagaaaattattcggggggaaccagttcctgaagaagatgaacacattgatggaactttattcgcgcagccataacgcggctgctacatacaaacagctgctggagcttgcgccgctcatacgcacgaacggggaggaagcgctgtatgatctgaaccgcgctgcacttctgtacgatatgaagcgttaccgggagtcggcagatatcgtgcttgagataaagccgttaaatccggaatttgacgccaggtgcgcgtctttaaagactaagatcatgaatgcctggcagggaggagacagttattaagatgcaggatataacaaagctgtatgaagagatgggaataagggaaacggttcttgcatttgggcgggagacagagaccgcgctgaaagatcgtttcgatgagatagacagaaccgcagaatataatcagctgaaagtgatccgtgccatgcaggaaaaccgcgtatgcgaggcatgctttaactacgcgagcggatacggatacagtgaccagggcagagatacgctggaggaagtgtatgcctctgtgttccacacggacagcgcgctcgtgcgtccgcagatcacatgcggcactcacgcgctttctcttgcgctcggcgcctgcttgcgcccgggggatgagctgctctccccggtggggaaaccgtatgatacactggaggaggtgatcggcatccgcccgtcaaaaggttcacttgcagaatacggcatcacctattcacaggtggaactgctggaagacgggacgtttgactatgatgggatcagagctgctctcaatgacaggacgaagcttgtcaccattcagcgttccaaaggataccagacacgtccaagcttttcggtccggcagatcggagaactgatcgcctttgtaaagcggctcaggccggatgtgatctgcatggtagacaactgttacggggaattcgtggagacgcttgagcctagcgatgtcggagcggacatggtggtcggttccctcataaagaatcccggagggggacttgcccctataggcggatatatcgcgggcagacaggacttgatcgatgcctgcggttaccggctcaccgcgcctggactgggcagggaagtaggagcgtcactcggggtgatgcagtctttctatcaggggctttttctggcgcctacggtggcggccagcgcgctgaagggggccgtgtttgcagccagtctctatgaacggctcggttatggtgtcgttcccggcggatcagagagcaggcatgatatcattcaggccgtagaacttggaacaccggaaggcgtgatcgctttctgccggggaattcaggccgcggctccggtggacgcttatgtcaccccggaaccatgggcgatgcctggatatgacagcgacgtgatcatggcggcaggggcttttgtgcaggggtcatccattgaactgagcgccgacggtcccatcaaaccgccatacgcagtgtactttcagggagggctcacatggcctcacgcaaaactggggatccttatgtctctggaatatatggcaagggaagggcttgtaaaaatatagggcgtcaaagaagggaaaagagatgggaacgatagcagttatcggcggcggcgtctccggaatgacggccgcggccgcggcagcccgtaaggaccgccgcgccggcgtgtatatactggaacataacgacagtcttggcaaaaagatactttctacgggaaacgggcggtgtaaccttacgaaccggaacatgtccgcagcctgtttccggggcggggaccaggagatcgtggaggctgtgctgcgccggtttggcgggaggcagacggaggaatttttccacagcgtcggggtgctgacacatgcgaggggagactatgtctatccccgctccgaacaggccgcagatgtcagggagagtctgcagatggaacttgtgcgccttcgggtcggctgccatatgaatgaacatgtaaaaaagatacgaaaagaaggacagggatttatcatagagagcggaggtaaacaattccgggcggacaaggtgatcctcgcctgcggaagccgcgcctctaagatcgccggctcggacggaagcggctatactctggcaagggagctgggccatacgctggagccggtcgttccggcgcttgtccagctgaaagtccgcggcaatcctttcgccaaagcggcaggggtgaggacagaggcaagaattgctgccatagtcggaggaagagaggcggcttccgatactggagagctgcagatcaccagttacggcgtctccggtattccggtttttcaggtcagccgttttatttcaaggggactatatgaaaaacgccgtgtacagacagagatcgactttctgccggagatgtccctgcaggagacggaacgtctgtttatacagaggagacagcagttcagggggcgcagcgccggggaattccttaccggtgtattcagccggaaactcatcccaaggctgctggagcttgcaggcatccggctgaatacaccggcagaaggcattacgccaaaacagcttaagtcgctctcttatgtatgcaagcggacagtccttgacattgaagatacgaatggatttgaacaggcgcagatatgcgcgggaggagtgaagacttccgagatatgtccggatacgatggaatctctccttatgcctggcgtgtatatcgttggggaacttatggatgtggatggtatgtgcggagggtataatatcacctatgctgtcgcgaccggatatatcgccggctgccatgcggctgatgccgtatcgcttctgccggaaactgcctgtttgtaaaaatcccggaacagcacaatatattctgcgctgttccaaagtaagaaaggaagagtcagatgatacgtatgacccagcttaagctgccggcagatcacacgaaagatgaattgaaggataagattttaaaactgctgcgcattgatactcatgcgcttctttcttatgcggtaataaaacagtcgctggacgcgagaaagaagccggaactttattacgtctatacggtagatgtacacgtatcggatgagcaggctgtaaaaagacggacaagacataaaaacatcatgttctgcagaccggaacctgactacgtgttaagagcccggggcgatcaggcgccggcgcaccgcccggtcatcatagggacaggccccgccggccttttctgcggatatgagcttgcgctgctcggataccgcccgattcttcttgagcggggggcagacgttgacaggcggcttgcggatgtaaagcagttctgggaagaaggaaagcttaatatccattcaaatgtccagttcggtgagggcggcgcaggtacgttctcagacgggaaactgaacacgcttgtgaaggacccgcaaaggcgcaatgcaagagtgcttaaggtgtttacggaacacggggcgccggaggagatccggtatcagaacaagccccatctcggcacggatatgctgaccgggatcgtaaagaatatgcggaagtccatagaaaagctggggggcgaagtgcgtttcgactccctcgtcaaagacatccggacagtcatagaaggagacgcacggcggctcgccggactgctcgtcgaggatctgcggtcaggggagcggtactggcttgagaccgaaactgcagtttttgccatcggacacagtgcaagggatacgtttgccatgcttgagaaacaaggactgcccatggaggcaaaatcatttgcggtcggagtgcgcattgagcatgcccagacaatggtggacaaagaacagtacggggaggcgaatgccgggaaactgccgccggctgcttacaaactcaccgcatccgcctctgacgggagaggggtatatacgttctgcatgtgcccgggcggatatgtggtcaatgcgtcttccgaggagggaagacttgcggtgaatggaatgagttaccatgacaggggcggagagaatgccaacagtgcggtcatcgtgaccgtatccccggacgattacggagcagacgggccgctatccggagtggaattccagagaaggcttgaggaggccgctttccgggagggaggcggaaacgtcccggtccagctttttaaagatttccgtgagaacaggacgtcctccggcggcggaaatgtgtccccacagataaaaggagcgtaccggtgggcaaatgtgcgcagtatatttccgacatttctcgcgcgggatatcgaggaaggaatcgcggcattcgaccggaaactacccgggtatgccggggacgacgccgtagtgtcaggtgtggagagccggacgtcttcaccggtgcggctcgtgcgcggagaggatatggagagcgggataagagggatctatccgtgcggcgaaggagcgggatatgcggggggtataacttccgccgctatggacggtatccggacagcggaagcaatcgtcagaatataccgtcctttcgacaaacgtgacgaagccttaagaaatttttaatgggataagtatatacacgtattcttaaatatgataaaatatactgagtttttctagtgagataaatgaggaggagtacatatgaagggaacaggaagcaagaatgcctgggcgctttttctgttgatcctgacagggatcgtgctcggtggttttatcggaatgctggcggacaaagttccggctctttcctggctcggatacggacagtcttttgggctggatgaaccggtcgtcatgaatctgggactgctggtgatcacgttcgggctgacgataaagatcacgatcgcaagcatcatcggcgtaataatatcgattatcatttaccgcttcttataagtttctctgcgaagtgtcatacgaatctgctgataatatgaatcaaacaaataccattcgagaaattcctgagatggaacgcccatatgaaaaatgtgagcgcaggggggctggcagcctaagtgatgtagagctgctggctgtattgttacgtacaggcacgagaggtgaaaatgcgctgacgctggcacagaagatcctgtatcataccggtgagacggggatattgagcatccatcagttcagcatagaaaggctgatgcagataaaagggatcgggaaagtgaaagcagtccagatatcctgcatctcggagctggcgaaaaggctggcaaaggcgtgcgcaggggaatctctctgttttaccaggccggagacgatagccggttattatatggaggatctaagacatgagaagcaggaacagatgaagcttttaatgctgaattcaaaatcaaaactcatcggtgagacagatatatcaaagggcacggtcaatgcctccctgatcacaccgagggagttgttcatagaagcgctgcagaaaaacgcggttgcgatcattgtgctgcacaaccacccgagcggcgacccctcacctagcagggaagacaggctgctgacgcagagaatccgtgaagcgggagctttgatcggaattgacctgttagaccacgtcatcattggcaataattgttatatgagtttccgggaggagggcatactttaagaaagggcaaagtcaaatggctagaaatatatacggattggatcttgggtcttatgagatcaaggtctacgataaaaagaaagatgagatatggaaagagaaaaacgtgatcgcgatcgccaataaaaaagagatatttgcggtcggagacgacgcttatgaaatgtatgagaaagctccggacaacattgaggtcattttcccgatgcaggaaggtgtcatatctcattttaacaatatgcagttcctgctgcagaacctgctgaagaaagagcggcagtttgccaggggatccgagtatgttatcgcggttcccacggacgtgacggaggttgaaaagaaagcgttcttcgacctggtcatacattctaccgcaaaggcaagggaagtcaatatcgtggagcgctccatagccgacgccgtgggactcaatctggatgtaaagaatacaaagggactgttcattgccaatttcggcggtgagacgacagaactgtctgttctggcaggcggaggtatggtcttgaaccggcttgtaaaggtaggcggtgtcacctttgaccattcagtggccaatcttgtccgccacagccatgactttctcatcgggaggctgacggcagagatgctccgcaagaaattcggtgtctttacagaggatacgtcctcgacgcttagggtggcgggcagagatatgatcatgggagtgccgatacagaaggacatctcgatcagccttgtgcgcgccgccctgaaagagccgctgcaggaatgcatacgggcggtctactcactgctggaccgcacgccgccggaagtgagaagggcgatctataaaaacggcatcttccttaccggagggatcgccaatacgcccgggctggaggattatatagaaaaggcagtcggaataccggtcaggactgcggtggagccggatatatgcgcggtcaccggtcttaagaagatcattatgtcaaaagatctgagaaaacttgcatattcaatgttagacgaaaattataggtggatgagataatatgaaaatcaaaaatcaatcttcgctttcaagtaaatactggctgctcatcatagctgtcgtctgtgtgatacttatgggtatcggcagtctgcccggcgtaaggggacctttgcgttttgtggcaaactataccgtgattccgatgcagaaaggaatcagctatgtaggaatgtggatgagtgatttttccaagaactttgagacgatgaatgatatgaagaaggaaaacagcgagcttcagtcaaaggtagacgagctgacgatcgacaacacaagactcaggcaggaccagtatgaactggaacggctcagagagctttacaagctggatgaaaattattcggattataataagatcggcgcccatgtcattgccaacaacgggacaaactggttcagcgactttaccattgacaagggaagtaaagacggtatcaaggtaaactgtaatgttatggccggaagcggccttgtcggcattgtaacggaagtagggccgaactatgcgcaggtgcgttctatcatagacgatgccagcaatgtgagcggcatggtgctttctacctcagacacgtgtatcgtgcggggggatctgaaactgatgtcggatggaaggatccggtttgaaaagctggcgaacaatgacaataaaatagaagtcggagaacagatcgtgacgtcccacatcggggaccgttttctgcagggactgtttatcggatatataagtgagatagaagtggattccaacaatctgacacgttcagggtatattacacctgcggcggacttcagcaagctgcaggaggtgctcgtcatcacgacgacaaagcaggatatgatcaacaaggatgccggcacaaaagacgggggggaatgatcatgaaacgcagagtaatcacccttgtcataatcatcgtctgttttctgcttggaagtacggtttttcatgtgctctccttcgcagagatcaagccgaatctgcttatcatcgtcaccgcttcttatggatttatgcgcgggaagaaggcaggcatggctgtaggcatgatctccggcctgcttatggatatcttctggggcgggacccttggcttctacacactgctttttgcggtgatcggttatgtgaacggctgtttccggcgcctgttctacgatgaggatatcaaactgccgatcgcgctcattgccgcaagtgagcttgtgtacggacttgttttatatatttgcttttatatgctgcatggagatttttcttttggaggttatcttacaaaagtgatcatgccggaacttgtatatactattctggcaactctggtactgtatcagatcatattacacattaaccgaaggctggaaacagaagaacaaaggagtgcaagtaaatttgtatagcttatgggaccgggtgaaatccgggatatatgaagtcgtaaaatcaagagtatttgtagccgtcatcattttctgtgttctgtcggccatccttctgcagagagtattttacctgcagatcgtaaagggacagaacttcgcggatgagtacaagctccagatacagaaaacaaaagagatacagggcacgcgcgggaaaatatatgaccgcaacggaaacctgctcgcctacaatgaacttgcctattctgtcacgatagaggacaactgggaagactcagctgacaagaacaaagagatcaataaggtcatcaatacggtgatcgatatcgtagagtccaacggtgatacagtgatcaataacttcggcgttattctggacggtgacggcaattataagtttgtggctgaaaatgacacgcagcgtctccgctttatcgccgatgtgtacggcaaaaagacgatagacgagctcagtgacaagcagaagagcagcacggcacaggatattatcgactacctctgcacggacaagctgtacggttatggcatcaatgagaagaagatggacaaggaggcggtgctgaagcttgtcaatataaggtatgccatctccctgaacagcttccagaagttcatagctaccacgatcgccgaggatgtaagtgatgagaccgtggctgtcatcatggagaatctggattccctgcaggggatcgacattgaggaagagtcgctgcgccggtatacagacagtaagtgctttgcatctgtcatcggatacacgggacagatatcccaggaagattatgacgcgctcagcaaaaaagagcaggaagagtattccaagcaggatacggtcggcaaggccggtcttgaaaagacgctggataagcagctccaggggaaaaagggacaggtgaagctctatgtcaacagtgtcggcaaggtgatagaaacggtcaagggaaaagatcctgaggcaggaaatgatgtctatcttacgctgaacgctgacctgcagaaggcggcctatcatattatagaacaggagcttgcgggcattctgctctccaagatacagaatacactggactttgacagaacgaaggtggaggacggcagtgatgtcatcataccgatcggcgatgtctataatacgttcatttccaatgatatactggatatgagccatttcggggaggaagatgcgggaacgaccgagaaagaagtggcggccatcttcggttcaaggaaggaagaagtgctgagcagtctcacttctgctctgacagatcccgatgagagggcatataaagatatgtccaaagagatgcaggcgtatatgacatatatcgtatcggaaatactgacgaacacgaccggtgtgatcatgtcagatgctatcgatacgaacgactcgacgtataaggcgtggaaagatgacgaaacgatcaacgtctatacttatctgaattatgccatatccaaaaactgggtggacacgtccaagctgaaggagtttgtgaaggacggcaaatattcagacgcaggagaactgtatcagggaatggtaaagtatattatcgattatgtggaatccaacagcggatttgacaaacttatatacaaatatatgataaaatcaggggcagtgaccggacggcagatatgcctcatgctttacgagcagaaaatactggaatacgacgaggcacagtataatggtcttctttccggcagcataggagcctacgatttcctgcggggcaagatacaggatctgacgatcacccccggacagcttgcgcttgagccgtgtacaggctccatcgtgatgacagatacgaacagcgggcaggtgctggcatgtgtttcttaccccggatatgacaataaccggctggcaaatgccatggactccgattattacaataagctgctgacagaccagtcgagaccgttttacaacaacgcgacacaggaaaagacagcgcccggttcgacgtacaagcctctcgtcgctgtggcaggtctcacggaaggtgttatcaatacggattcttatattacgtgccacggcatctatgaaaagatccagccgagcccgaaatgctggatatatccgcaggcgcacggaacacttaatgtggaaggcggaattgagaattcctgcaacagtttcttttatgaagtcgggtaccgccttggcctgaaagaaggaggacttagtcaagtcgcctccgacaataatgaaggcagcgcgaccaactcatattattccagtgacctgggacttgacaaactgaagaagtatgcggaggcattcggcctgaatgagacttccggacttgagatcgatgagtccagccctcagatatcagatgaggattctgtacgttcagccatcgggcagggcagaaacaactatacaacaagccagctggcaaaatatataacagcagtagccaacaaaggaaccgtctatgatctgacgctgctgaacaaagtgacttccgtagacggaaagacgataaaagaatatgaacctaaggtcaaaaacaagctctcggatgtgaccgcctccacctggaatgccgtgcacaacggcatgcgggcggtaattgttaaccacagcgccacattctcagatttgaatacaagcagtttaaaactgtcgggaaagacaggaacagcacagcagagcacgacgcatccggaccatggattgtttgtaggctttgcgccgagcgacagcccggaggtggcatttgcgatccgtattgcaaacggatacagttctacatttgcctccgaggtgggcagagatgtcatgaagtactactatgagatagtcccggaggatgagatcatcaccggtgaagccgcaacgatcggaagcagcgcaacaggaggggattagcagaaaggatgagtgaatgtgaaagacccggttctcattaagagtaataaatacggcatcacgatccgcctggacggggagatgccttacagagatttgttaccggaagtcaagaccagattcgagtctgctgcgcattttttcaacaatgcacagatggcagtagaatttgaaggacggacatttacagaagatgaggagcgtcttctcatagagacgatcgaggacgctgcgggaatacacatactttgcgttatcgagaaaaacacgtacacggagcagatgcacaaaagaatgctggatgagagcctttctgagatccatgaaagagacggccagttctatagaggtacacttagaggaagacagatcttagaatctgagacgagcatcgtcatcatcggggatgtagaagaaggtgcaaaggtggccgccaaaggcaacgtggtggtcatcggcacgatatacggcactgtgatagcaggtgccgcgggtgatgacagcgcagtcatagcagcactccatatgagccccaaaaggcttcgcattggagatattgaagtaaaaccgaatgtaggaggaagtttatcatgggcgaagttatcgtaatcacatcaggaaaaggcggggtcggaaagaccacaacaacggcaaatattggagctggattgtcccagttcgataaaaaggtcatagtgatcgacacagatctgggactcaggaacctggatgttgtcatgggactggagaatcagatcgtatataatctggtggacgtgatcgagggcacgtgcaggctgaagcaggcactcataagagataaacggtatgaaaatctctggctgctcccgtcggcgcagacaaaggacaagactgccatatcaccggggcagatgaagaagctgacatctgagctcaaagaagaatttgattacatacttctggactgtcccgcaggaatcgaacagggattccagaatgccattacaggcgcggaccgcgcgatcgtagtgacgacaccggaagtatctgccatcagagacgccgacaggatcatcgggctgctggagaacaacggactgaagcaggtagagctcatcattaaccgcattcgtatggatatggtcaaaagaggcgacatgatgtccgtggatgacgtcacggaaatcctgtcggtgcctctcatcggggcgcttcccgatgatgaacatgttgtgatcggcacaaatcagggggagccggtcatcggtattgactcaaaagcgggcagggcatatctcaatatatgcaagaggatcatgggaatagaagtaccttttatggatttgaatacagaatcgggattcttcactaaactttcacatttattcaagaaagattaggggggagccgtatgttaaaaaaatcttctgtctcaatagccaagaaccggctgaaagtgcttgtcacctcagaccgtgtacaatgcgcgccggccgcatacgataatatctgccgggaattatacaaggcgttgtccaagtatatggaacttacagaagatgaatttgatgtagagataacaagaactcgcatattgatcaaaatagcaggagaagagacgtgaaattacccagatttacaaaaccgtaccggttaaaagattacaagttcacattagtcatatccgtactggccctgtcagtgctcggcgttctcgtagtcggcagcgccaatgaatcttatcagaacaagcagatagtcggccttgtgttcggactggccgtcatggctgtcgtatctctgatcgactatgtatgggtgctgaatatgtactggctcatctatgggttctccatactgagcctcctgctcgtgctgttcatcggggacgaagtcaacggggcgacccgctggatcaacctcggatttacgacatttcagccttcggagctggcgaaaatactgcttattctcttttttgccaagtttatcatgaagcatgaggaggatatcaattataagtggacgatcataaagtatgcggtgctggccggaataccgctggcgctgatcattgtggagccgaatctttccacgacgatctgtacggcgcttgtgatctgcctgctcatctatatcggcgggctgagctataaatttatcggtacggtgctgctcatactcatacccgccgcgatcatatttctcagtatcgttgtacagccggaccagaagattctgaaggattatcagcaagaacgtatcctcgcctttctcgaaccggagaaatatgcaagtgacggcgcgtaccagcagaataactccgagatggctatcggttccggacaactgacgggtaagggacttaataacaatacgacgacatcggttaagaacggaaacttcattctggagcctcagacagactttatatttgctattgtgggggaggaattagggtttgtaggttcttgtgttgttattgcactaatattaataattgtgatacaatgtattctgatagggcttcgatcgcaggatatggcggggaagatcatatgctgcggcatcggaggactcatcgggtttcagagcttcatcaatatcggggtcgcgactaaggtgcttccgaatacaggagttccgctgccgtttgtaagttacggactgacatctctcgtcagtttatatatcggtattggatttgttttaaatgtaggtctacagccgaaaaaatatcaataaggagtgaatactatgaatataggcctgattgcacatgattccaagaagacgctgatgcagaacttctgtatcgcttacaggggaattttaagcaagcatgaattgtttgccaccggaacgaccggacgtctcatcgaagaggtgacaaacctgaacatccacaaatatcttgcgggtcctcttggaggtatgcagcagcttggagcacagatagggcagaatgatatcgacgcgcttatttttctcagagatccgctgaccccaaaaccgcacgagccggatgtcaatgacgtcgtacaactctgcgacatgcacaatataccgatggccacaaatctggctaccgcggagatgatcattctagcaattgacagaggggacttggattggcgtgaaatgtaccgttaagactttaatatgtgtaagtgcggttatggcaggcgtgcttcttacgggctgctctctgcttggcgctcaggatgtggctgccggttatgaggcggaacaatataataaaagtatatataaagcaggcctttttgcagaagacttgtgtgtcactgcaaaggatgttccccttgcggacgcaccggatacaggctcgttatctgcggcggctctgttcgatgtggataagagtgacgttgactttgcctataatgtacacgagaggctgtatcctgcaagcacgaccaagatcatgacagcgctcgtggcgatcaaaaacgcggacctatccgatgtcgttacggtcggcgcggatgcggatgagagcagttttgcggcagatgagcagacgtgcggcctgaaggcgggcgacaggctgacgcttgaggctctgctgaacggacttcttctgtattccgggaatgacaatgctgtggcgatcgcagactatgtaggcggaagtatggaagggtttgcagaaatgatgaacgaggaagccgcccggcttatggcgacggagagtcattttttgaattccaacgggctccataacgaagaccactatacgaccgcatatgatctgtatcttatttttaacgaatgtatcaagcatgaagaatttctggatatcataagagcaaaatcttacactgccgatattaccggggcagacgggaataaacgccagatcacatgggagccgacgagcttttatgcactcggtgaggcggcgctgccgcagaatgcgacgataatcggcggcaagaccggcacaacaaaagaagccggcaactgcctcatacttctgtcggaagacgggcagagcaggccatttatttccattgtcatgggtgcggacaccaaagcgatattgtatgaagatatgaccgggcttattgaagcgatcccggcagataaataataacagaggggcatctcatgaaagggatacccctcttacttatgaacggctgcctggtgtgttggaaattctgccgtaaaggctgatgaggtataagccgcataaacctacgattgtgtagatgattcgtgacagccaggagagattaccaaacagaaaagctacgaggtcgaatctgaagattccgaccagaagccagttaattgcacctatgatgacaagtgtcagagcggtattgtcaaaccatttcatgtgatttcctccttttttcgatgctaaacatagtatgtctgcggaaattcaaaattatacatgagaaaggaaaatttgtcagatgggaccgaacatgtattattatccatattcagaatttttaaaaaataaatatggtgagaaggtgtataagcttccggtaaacctcccggtcacgtgcccgaaccgcattgcgggcagagggtgcattttctgtgccgagccgggtacgggctttgaagcgatggatgcgcaggtaccggtagcagagcagataatccgcacgaaggagcatatttccaaaaaatataaagcccgtctgtttattgcatatttccagaactacacaaatacgttcctgccgccggaatccttccgcgcttatgtgaccgaggcggctaagataaaagatatcgttgagatcgcggtctctacgagaccggactgtatcacggaagaatatctggacatcctgcagaaggtcagcagagagcatcaggtcgagatcacggtggaactcggcctccagaccgtcaattatcatacgcttgaaaagatcgggcgggggcatacgcttgcggcgtttatagacgcggtgctcatgatccgctcttacggctttgacatatgcacccatgtcatcttaaatctgccgtgggatgacaggagcgactgtctggaaacagcgagggtattgtcagcgcttaaggtcaatgcggtgaagatacattctctttatgtggcaaaaaacacaccattgtgcgaagcctatgaaaatggtacaataactctatgctcaaaagaagagtatatggaacggcttatatgtttccttgagcttttggatccagatatggccgtggaacggcttttcagccgcattcccgaaaaagacgcagtgttctgcaactgggggatgagctggtggaagctgaaggacgagctgacaaaagagatggagcggcgggggacatatcagggaagaacgtatgggtatctccacggagcggctttacatacattaagagatatacgatagcacagggggttatgttgtggcgggaaacgatttgaccaacatacaggtctaccggaaaaaatggaatatcaatataggggtcatcatattcggcgttattttcatctatctggccgtgacagtgctcatttacctcacggacaagaaagtgtccgcttatgaagtgcgggagggctccatattaaaagatacagcttatacaggatttatcgtcagacaggaagaggttgtgaatgccgagggggacggctacatcaattattttgcgccggaaggggcgaaagtcggagcaaggacagatgtatatacactttctccgggcaagcttgactttgatgagccggacagtggggaagccgctgagcttacggcagaagaacaggccgccatgcttgtaaagacacagtctttcagcgaaaattttaatgagagccagtacagtgatgtctacacattaaaaaataatatatctgccgtgctggagagcaaatcaagccagagcaggcagtcgcagcttgacgccatgataagcgaagggaaagaggggcttcaggtgtacccggcgtccgacgacgggatcgtcatctactccacagacggttatgaagggcttgagctgaaagatgtgacaaaagatatggtggagaagaaagattatgaaaggaaaagcataaagaacaatacgaaagtcaggtcgggagagccggtatataagctgatcaccgatgatgcctggacgcttgcggtcgttctcgaggatgaaacggcccaggagctggcggagacaaagcgggtaaaagtccggtttacgaaagacaacgagacgacgaccgccggatttgcagtatataatacgaaagattataatattggatttctgacttttacgagttccatgatccgttatgcgcaggagcgttacctggatatagaactcatactggaggatgaatccggtctgaagataccgaaatcttccgttgtaaagaaaaaattctatacggtacctgaggattatctgacgcaggggggaaacagcagggatacaggagtgctcattgataccggcagggacaatgccgagtttcagaaagcggatgtctattacagagacagtgaaacagggatggtctatctgaacccggacgcctttgaggaggatacggttttgatcaggccagattcaaatgatacatacaggctcaaagatacgaagagtctgaaaggtgtgtataacatcaataaaggctacgccattttcaaacagatcaaaatactgtgtgagagtgacgagtattatatagtagaatccggaaacaattacggactggccaattatgaccatatcgctctggacggcagttccgtaagagagaacaaggttgtattttaaacaaaggggtgacagaaatgatgaaagagaagctggaaaatgtggaggaaaggattcgcgcggcctgcgaacgggcgggaagaaaccgcagcgaggtgacgctcatcgcagtgagcaagacaaagcctgtggagacgctcagagaagcttacggcctgggggtccgtgtgtttggagagaataaagtccaggagcttgtcgataaatatggcgcgctgccggaagatatacactggcatatgatcggacatctgcagcgcaacaaggtaaaatatatcattgataaagcagaactcatacattctgttgattctttgagacttgcagaaacaattgaaaaagaagcagaaaaacataatattacggcgaatatcttgatcgaagtcaatgttgccagagaagagagtaaatttggcgtaatgcccgaggaattagatgaaattgtagagaaaattgcaggattcaatcatctcaacgtaaagggccttatgacaatcgctccatacgtcgaaaatcctgaggaaaaccgggctgttttcgctcgtctgcgcaaattatctgttgacattgccagtaaaaacgttgataatatgaatatgagtatactttccatgggtatgaccaatgactacgaagttgcggtcgaagaaggggctaccatggtgcgagtgggaaccggtatattcggtgagcgtgattacgctcaagtataacgtaagataggagattttttataatgggagtattagataagttcctggatatcatgaagctgagtgatgacgacgattacgatgacgatgatttcttcgacgacgactacgatgatgacgattacgaagagaagcctaagagaagtttcttccggaaagaaaaggactacgacgatgaagaagaggatgattacgaacttccggccagaacatcttccaaatcttcccgttcaaataataaagtaacaccgatgcgccagcctgcaaggagaagcggggtgagcatggaagtatgtgttatcaagcctacttctgtcgatgatgcaagggagatcacggagaccctgctgtcaggcagaactgtcattctgaatctggaggggttggatctggaagtggcacagaggatcattgacttcacatcaggcgctacctttgcgatcaacggcaatcttcagaaaatatcaaactacatattcctcgtaacacctactaacgtagatatatccggagatcttcaggatctgctgaacacatcttttgatgcgtcgtctatgaggtcgaggttttaggacaggttatgaataaggaagagcagttattacagaaaaggctggctgagttgtctgacctggcctttacacgcggtatcgttacattttctgattttcttaatttaaatgaactgaatatactgcatacaacgccaaagcatatgtttcccgcgcattacgagacatatggcggctatgatctatcagagcgtcagatggttgcatttctacctgatgctctttattatgagtacacgtatccgctgagcgtcatagaggtggcgccggtcagccggaaatttgccgaggaactgacgcaccgtgattatctcggcgcgcttatgaaccttgggatcgaacgttccaagctgggagatatcatagccggcagttttggcgcctttctgtttgtaaaagaagaactggcggcgtatatcacaggagagctgacacggatccggcatacggccgttcaggcagtacagcgcccggcggcagaatttacctatgagccgaaatatgaagagatgaagggaaccgttccttccgtccggctggacacggtgctttcagttgcgtggccgctgtccaggagcaagctgacggcttatattgaaggcgggaaagtatttgtaaacggaaagctgatcacgagcaatggttatcatctgaaagaatctgaccgtatatctgtccgcggaatggggaggcttacttatgaaggaatcctttctcagacaaaaaaagggcggtatatgatatctgttcacaaatatatatagagagatggcatattatagaatggacaataacaatatgaaagaggaaaacagaataaagcattatgcggctgctgtcacagcggctgcagccggggtactcattgaccagctcacaaaatatatggcgatcgcaaagcttaaggggcaggagcctttcgtacttctaaaagatatctttcagtttgaatatctggaaaacaggggagcagcttttggactgtttcagaaccagcgtattttcttttttatcagtgtggccgtcatctgtgcggtcgttatatggttttatatgaaagttccgatggagcgcaggtttcttccgcttcgtatctgtgccgtgatgatagtggcgggtgcgttcggcaactgtattgacagagtaaggctcaattatgtggtggatttcttttattttaaactgatcgatttccctatatttaacgtggccgacatctatgtgacagtatccacgtttgcgttggtgatactcctgttcttttattataaggaggaagattttgagcgaatttttcaccgtagaaaatgaggaaggagaacggatcgaccgctatcttgcggaaatgctttctgaccggtcccgttcctatatccagaagctgatcaaagacggtcatatattagtgaacaacaagcctgtaaaagccaattacaggctttcctgcggtgatatgctggaagttacgataccgtccgcaaaagagccggatattctgccggaggacataccgcttcatatcctttatgaggatgcggatattatcatcgtcaacaaaccgaagcagatggtcgtacatccggctcccggtcattattcagggacactcgtcaacgcgcttatgttccactgcggccgggaactgtccggcatcaacggcatgatgcggcccgggatcgtacacaggatagatatggatacgacggggtctctcatcgtatgcaaaaatgacatggcacatcaggctttgtcggaacagctgaaaaagcacagtatacgccgcatatatgaagcggtcgtacacggcggttttaaagaggaagagggtacggtcagcgcgcccatcggaagacatcccacagacagaaaaaggatgagcacccatgcaaaaaacgcaagagaggcggtcacgcactataaagtgctggaacggttcggagaatatagttatatacagtgcgaactggagacaggccgcacacaccagatccgtgttcatatgtccagcatcggccatccgatcgtcggtgatatagtatacggcccgcgaagatgtccttttcccggtcttcagggacagacactgcatgcaaagacgctcgggatcatacatccgcgcacgggtgaatatctggaagtggaagcgccgctcccacaatattttgtggaattgttagagagactaagggatatttagtgtaagattttcggaaaattgtgtacttttcacatatattgttatataatataggcatacttacaaaggagtgtgattgcatggctgaaaagactaatacaattattacgataggaaggcagttcggaagcgcggggcgcgaaatcggctataaagttgcaaaagacttgggaatcaaactttatgataaggagatgctggacagggcggctaaggagagcggcatatgtcaggagctgtttgagacacatgatgaaaagcctaccaacagttttctgtattctctcgttatggatacgtattctctcggatattccagcggaagctacacagatatgccgatcaaccacaaggtgtttctggcgcagtttgacgcgatcaagaagatagctgatgaaggtccgtgtattctcgtaggcaggtgtgcagattatgcgctccaggaatatgaaaatgtactctctgttttcattcatgccagtcttgacgcgcgcatccggcgtatcgcgcgcatctatgaattgacggatgcaaaggcaaaggatatgtgccagaaaactgataagaagcgcgcgagctattataattattacacaaataagaaatgggcggatgtagagagctacaatttcagtttagacagttctgtgctcgggatcgaagggactgccgaagccataaagaggctcgtggagctcaaggagagagggctggaccggaagctgtaaacgtggcggtgtaacataaacaaatgaaaagacggaaggaagcaccgctgcttccttccgtcttttttactgccgtatgtgcgggacgcggtccggccatcctttgatatttccgttcaaaacagctgtaaacatacgctgtcttgctcccggatgttcgtcattcagctgttttacaagttccttggcatactgccgttttgtgtatccgtcgatgggacagcggcttgtcactacaggcaggtcatatttattcttaaaccctatgatatctgcctcgtccacgaacatgacagggcgtatgacggtgaggtccatacggtccagataagtccgtggagagaaagaataaaaacgtccctcaaacagaagggagaggagcatcgtttcgatgatgtcatccttatgatgcgcgtaggccaccttattgcagcccatctctttcacggcctgattcagtgcgccttttcgcattttggcacagagagagcacggattgctctctttgcgctcttcaaagagaatatgggcgatatcggtctttacgatccggtaagggacgcccagttccttacaaagctttatgacaggggtaaaatcgcattcactgtatcctaggtctaccgtcaccgcgctcagctcaaatttgttcggataaaaccgtctgagcccgtgcagcgcatataataatgtcaggctgtcctttccgccggatatcccgaccgcgatgtggtcgccttcctcgatcatgccgtattcatcgaccgcttttctcgtatagctgagcagctgttgcagtttcatatctcactggtcctttctgttctcactccctttttgcagggaatcattcgtacgagctaatattatattatttcaggaaatattacaataggtaatagtaagatggaagatggagcaaaaagagactcatatggcttgattcgataaatgctttcatgtaaaatgagacgagaggatgaaaatatgcagaaaatcaagatattgatcgtagaagatgacaaggcgatagcggacgcggtcgcctacacactggaaaaagaagaatttaagttcataattgccggcagcgccgctgaagcgctcccttatatcggaaggaaggatatcggcctgtatctgctggatgtaatgcttccggacggaaccgggtatgatatatgcagaaaaataaagagataccacaatgttccggttatttttctcactgcctgtgacgaggaagccaatgtcgttatggggctcgatatcggtgcggatgattatatcgtaaaaccgttcaggatccgggagctgatatcccgtatacgcagcgtgctgcggcgttatgacagcaggcaggacataggacctgcctctgtctattgtgccggagatataagggtgctcacggcagagggcaaggtgtactgcaaaaaagaggagatctgtctgagcgcgctggagtacaagctcctcctgtttcttatccgccatgagggacagatcgtgacgagagagcagctgctttcccacatatatgacattgcgggtgaatatgttaacgacaatacgctgaccgtgtatataaagcgtctgagggataagctggaaactgacacagagggcccggagatcataaggacagtacgggggcttggatatacgataggagaatcacatgtttaaaaacagagaaatcacatatactgtcatttttatgatcctcgtaactgccgtctcgtctgccgtatgcgctcgcgcgccgtcctttggcccatatgtggtgctggcggacggttttctttatctggccggcttcctggcattttcatcttaccgttacggtagattgagaaagctgtcagagtttctgagaaaagcgcagtcacagatgctccctcttgaagtgccggaccagatggaaggggaactcggcgtgctgaaaagcgagttctataaactgatcacaaaatgtcactctcaggcagaacttctgagcaaagacagacagtttctctccgatacgatctcagatatctcgcatcagctgaagacgcccatgacatccatgaatgttatgatcgatctgctgaaggacgagacgctgccggccggcaagcggctggagttcacgcatgccctccgcacccagctttcccggatggaatggcttttgtccgcgatgctcacgatgtcgcggctggacgcaggctccatcgtgctgaaaaaagaggaggtaaatgtatcggaaatgctcagcagggcatcggagcatcttctcataccgatggaactgcgggaccagacactgatacttccggagaattcttcggctgtatatcagggagatctgcactggagcagcgaggcgatatccaatatcttaaaaaactgcatggaacacaccccgtacggcaaaacgatcacgattgaaacggctgagaactctgtctatacggttatcacggtaaaggatgaaggcggcggcatcagcgacaaggacaagccgcacgtttttgagcgcttttacaagggggcaaatgcctctcccgacagcgtcggtatcggactggctctcgcaaagcagctcatcacggcacagaacgggacggtcgagatcgaatctgtctatggaaaatatactgtatttatcataaaattctatcattttaatatgtgacgatattgtcacttattctgtcacctcattgtcaccttccgtgtatatactgagagcataaaggaagaacactgcaaggaaggaggcatcttatggatattatccaaacactaaccatccggcacctgaaacataataaaaagcggacgctttcaacgatagcgggcatattgactgcaacggtcctgctgacaatgctgtctgtttttatgacatcttttgtacacagactggaggctgccgatgtcacacaggaggatgtgaagccgcttttgagcgcagcgtccggaatgatagctgttgttctggccgtactcgttatatttttgtacaacatgctcgtcatctctttcagggacagagggcgttacctcggcatactggcaagcgtgggagccaccccgtttcagagaggaaggatcgcgtttgtggaggccgttatactgggaagcgcgggaataccggcaggcataggcatcggtgtcctgctttcggccgctgtctttcctttccatgtggtcctctcctggcgcgtactgctgctcatatttctgtgtgaatgcgcggccgtcctgctgacaggcctggtatgtatcgggcggccgggaaaaggctctgtgatagagcttattcacaacaggacagacaagagaacatttaagaagccggttgtccttccgtcctggacagcaggccggttcggagcagaaagtaatcttgccctgaagaatcttgtgttttttaaaagacgttatctgatcatcggtatatcctttgcggtagccatgcttttatttctggacggttatatatatatgaattacctggacggcggatatgaaacacgggacagacgtccgaaagacaatgcggatctggtgctggaggaagattacaacaaaaggaatgaaaagtgggatgattttatctctgaagttatttccattcctgcggtggaaggatactccatacaggatagggccgacatgggaaccgtgctctttgaagcgaaggatatcgatcccgggcttaaggaatacacgagttatatactcggtatgtcctacaataatccaatgaaaataagcagcataaaaggagatgtgaaaaaagggtacgccatgaatctcgttcttgtcggaatggatgacaagtcgttccgggactatcttgataaggcaggggtaccggcggaatatgatgccggcaaagggcagattccggtgctggtggaagatcacccgatcgtgaaagacggcagtacgactaagtacaggagtatatttgcggagggaacgcgcggatctctttccttatttaccgattcgggacagtggatgtatccggtggcaacgccagagggagagcaggtggagcaatttaaaaaatgggagtttgatgtacttggcgtcaccacacagactgttccgtgctatacagccagcgcggtggaagaaccaaacacgatatacttctatacgccgcaggatgtctttgatcaagttgtaaggacagacggcttcccggcagaaaacggccaaacacaccgaaggcttgcgttaaagttaaacagtgaggcaccaaagcttcctgacaacgtgctatatcctgcagtggtccgatttgggaacactaccacccggggactgaagcttgtatcgtcttccctttcctttctcgctgatgaaaagatgcagaatactttaatggaacgcggagaagaagccggaaaggtgcagaatatgatcgaggacatcggggaaaggtacgggctgtcagatggaagggacatggatatagacaactttgactggtctgcgctcgactatacatgcaacagttatgccgcgcagataaagggtactatgtcagatccgtttccgcttctgcgtcatcttttttcctatggagttctgatctttctgactgtgatcagcgtctttcagatgatcaagatcattacttcagccgtgcagacgcgccggcgggaatttgcggtgtttctctcgcttggcatgagcaggaagcagatcgcgaaaatgctctatatagagaatcttatctacacagtgtgtgcctatattgtcggacttatattcagtatactgctggcgctggcgctgttctggtcatgggggagagagcaggcggtggagcctgtattcccatatgagatcgtactgatggaaacagcggtattcctcgtgctcagcattttctctgtgtatctgtcggtaagaagtgtgaaaaagatacagctcattgatatcatcaaagaagaaaccatgtaggaggagtgtgtatggaactgttaaaggtcgaaaatgtaagcaagatatatggtacaggagaaaatgaagtaaaagcgctggataacgtttcctttacggtagataaaggagaatttgtagcgatcgtgggtccctccggatccggcaagtccacactccttcacatgttggggggtgtggatgtgcctacctcgggtgatatatgggtagaaggcgtgaaacttggcagtatggatgagaagaagctgtccatcttccgcagaaggcaggttggacttatctatcagttttataatctgatccctatattggacgttcaggagaatatctcactgcctcttctgctggatggtcagaaaccggatgccggatatctggatgaactgatcgggacactcgggctctcgcagaggctgaatcaccttcccggccagttgtcgggcggccagcagcagagggtatccatagggcgcgccctcgtcatgcatcccgccctcgttctggccgatgagccgacgggaaatctggacaggaagaacagcgcggagatcatcgcactgctgaaagagtcaaacaggaaataccggcagacactgatcgtgatcactcacgacgaaggtattgcgctgcagagcgaccgcatactctatctggaggacggcaggataaccgagagaaattaaggataatgcattggtagtatacgtctgtcaaataaaatatgagtgatctgaacacgggaatgaatggatatataatatatcatttccgtgttttttgtaatatttgcagccgccaatggtaaccgatttctttaccgatgttgtatctgccgctattgttttgtataatggttaacaaactttaacgaaaggaacaaggctatgaataaacatcacgtagagatcgacacgggccggtgtatcggctgcggagcatgtgtgaggacatgtgcagcacataacattgaattgaagaacaaaaaagcggaaacgatattgagtgactgtctgatgtgcggacaatgcacggcagtctgccccgctgaagcggtattgatcagcgggtatgagacggaggatattataaaaacaaacaatgagcggttagatccgaagcaggttctggacgtcatccgctttagaagaagcgtcagacagtttcaagataaaaagatcccgggagaagtcatcgacgagatcctagaggccggacggctcacccatacagcaaagaataagcaggatgtgtcatttgccgtgctggacagggagaaggatcatatagagcagatggcggtcagcatgttcaggaaatggaaacccctggccgatttgttcagtcccatggcaaggcaaaataagatcgacagacactttttctttttcaaagcgccgatcgtcattgtcattatggcagaagacaagacaaacgggatcctcgcggcacagaatatggagtttgctgcggaggcaaacggacttggggtattgttcagcggttttttcacaatggcggcaaacagttctttgaagataaggaaagcattgaaaatgccgaaaaagaaacgcgcagcgatgacccttgtattaggttatccgcgtgtaaagtttcttcgctctgtgcagcgtgaaaaattaaaggtaacatatttgtaaaaaatcggagtatgaggatggaatgtgaagaaagacttaaaaaaatagtagatggtttccagatatgcagaaacgcgtttactgcaataggagacgatacgagacaattgatcctgcttgtgctgctggaaagtgatctgtcaggtatccgggtgggagagatcgcggaaaagacccatttgacgagaccttcggtatcccaccatctaaagatactgaaagagtcagggatcgtggcaatgcgcagagaaggaacaaaaaactattattatctgagcaaagatgagacgcaatggaaagagatcgcggatctggttaatcttatctatgaaagcattcagtatatgagtgctcagtcttagctttatttaaggaggacaaaaatttgatcttatatttttcaggaacaggcaatagtgaatttgcggcaaagaggatcagcagagagatccacgatgagactgtggatttatttgagaagatcagaaaccatgattttacagaactatattccgagaaaccgtggatcatcgtctcccctgcctatgcgtggaggattccgcgtattctgaatgaatggctgggaaagacaacgctggcaggcagtaaagagatttatttcataatgacttgcgggggtagcattgggaatgcgggcgcttatctcaaggagttatgtgccggcaggcagatggattaccgcggatgccttccggtcattatgccggaaaattatattgccatgttctccactccggctgaggaagaggcgcttaagatcattgagcatgcagaagccactatagacaaagcagcgtctttcataaggagcaaagcgacattcccgcagctttcggttacagtgaaagataaaatgagcagcagtatcgtaaaccgtatcttttatccgatgtttgtgcacgctaaaaagttccatgtcaaggatacttgcatttcctgcggaaaatgtgaggcgctctgtccgcttgccaacatacgtattgtggacggaaagcctgtatggggaacggactgtacacattgcatggcctgtatctgccggtgtcctgtcgaggcgatagagtacggaaaacacagcagcggactgccgaggtatacttgtccgaagttatattgaaaacatattatcgttataccggagagacaccccttcctgcgggggagtctctttttttgcgcctgactgtgtaagttgtgattgggtctttcttcataagctaaacttatggcgatggattatttttaaattatacaggctgattttaagatgttaaaataaaagtagaaaaacatgttattaaaataacaaatgatcagaaaaaaggaggcaaatgcgatggcaaattatgtaccaggcacgtacgaaggtatcggtcacggataccagggcaggcttatcgtgaatgtaactgttacggaagatgagatcacggaggttaaaatcatcaaacataaggaagtgcgggggcttgcgtgggacctccccacatcccctgtcgaggtgatgccgcctcaaattgtcaaatatcagtctctgaacattcctctcgtgaacggagctgacttgacgagcggtgctatcttagaagcggtggaaggggcgctaaaggccgcaggggcggcggacgatgtcatagagaagctcaaggcggcgccgggaccggaagcgccggaaccaaaagacgaagtgcgcacggtcgacgtggctgtatttggcgcgggggccggcggactcgcagctgcgatcgaagcaaaagaaggcggtgccgatgttgtgctcatagaaaaacaaggtatcacaggaggctctaccgcacgttccggcggaaagctgctcggagccggaacgaaatggcagaaaaagcagggaatctacgatacggaggagatgtgctacaactacctgatggaagtcgggaaccgcagaggcaatttcatggacgcgtccaaaaaccgctatcttgttaagaatctgaacagtacgctcgactggctcgggacaatgggatacaaagtacaggacgtggaggcgatccatgtgtccatgcagccgtggcgtgtacataacagcatgggagggggcggccagacaaacggccagggcggcgagatcacgactcctttgacgcaccattttgccggcagactgggcggcgagatcatatacaacactgccttaaaagaacttctcacagatgaaaatggtgtggtaaacggcgcggtgtgcgaaaagcttgacggttccaaattgactgtctatgcgaagaagggcgtcattcttgccaccggcggttattcacgcaacaaggagatgtgcgcaagatatccggtcgcccattacttctgtactgctccgaagagcaatgtaggggaaggccttgtagcggcagaaaagatcggagcccgcaactttgtgcatccgggcatacaggtggtgtatacgagcctgtcgtgcggcatcggcatcaatgacgaatcaggactgatcgtaaatgaacggggggagcgggtcgtcaatgaatggagctaccagtatcacgtatccgacgcgctggctgcatccggtagcaactgcggatggtacatcacaagcggcgacgagccgtacggcggcgttcagtacgggttcaaacaggccgtggagggcacgagccgtgacaaggcggcagacagtattgaggaacttgctgcgctgataaaatgtgacccggccacactgcgggctacatttgaccgttatcaggaactgatcgccaggggagaagacgaagactttggcaagccggccagattcttgcatccgatcgacggaccaaaatatgcggcactcagactccatccgtgtgtcacggtatcgttcggcgggcttgagaccgatatatcggcacgtgtgctcgataaagaaggaaggccgatcccaggattgtatgcggcaggagaggtggctgatacgggaatgttcgggacagagtatccgacatgtgggacctcgatcggaggcgctttattctatggaagaatcgcggggcgcatggcatccggacagtccatgctttagaacatattattttgtgcctgaagtcaggcgcggttgaaaggagaatatagagatggaaggaacagggcttaacaattttccgcagtttggtgtgctggcaggagtaaagatcctcgtatgcggcggagcgatagcaggtccgttcggcgcgacgctgctgggggagatcggcgctgaggtggtgcaccttgaatcgccgaaaaatccggacagtacacgcggacattatgggtattcacagaatcaccgcaatcagatatccatggttgcagatatgaagacgccggagggacttgagatatttaaaaagctgatcaaatggacggatattttcattgaatcttccaaaggcggaacttatgaaaagatgggactcacagacgaagtgctctgggaagtcaatccaggtcttgtcatcgtgcacgtatccgggttcggacagaccggtgtgcctgaatatatcagccgtgcgtcctatgatgctgtcggccaggcgttttccggatatatgagctttaacggtacgccgaaggaggccttgaagatatctccgtacctgagcgactatgtgacggcgctcaacacttgctggacggcactcgccgcctatgtacatgtgctgcgcaccggcagaggggaagcggtggatgtggcccagtatgaatctctggcccgtatacttgacacacggccgatcgagtatttcacagacggaaaagaatttccgcgcacaggcaataaggactcccaggccgctctgttcagtttctatacgtgcaaggacggagggaccattttcatcggaatgaatggatatggacccgtccatcgcggatatcctcttatcggtcttccaaaaccgggtgacggagacccggagatcgaccagatcatatcgggatggatggctgataccgaccttggccgcaggctggaggccgccatggagaagtttgtgtcggagcataccgtcgacgaagtggaaaagatcatgctggagaatcagatcccatgccagaaagtatattctctcgaggactgtgtcagagatccgcactggaaggcaagggagatatttacagaatgggatgatcctatgatgggcagagtcaaggggatcggcattgtgaacaaatggaagaataaccccggagagatcaaatggggcgccccgctgtttggggaaaataataaagaagtactccgtgatctgggctacacggaagaagagacagaagatcttgccagacgcgggatcacagcatgcctggattttgagcagacatatgagacctacaaactgggagaattgttcccgcactatcgcgaaggatttacggagcattggaaaaaggaacaggaggatgaaacatatgagatttgaaggtaaagcaatcattgtcaccggagccagttccggtatcggacgggcagcggcgcgtcagtttgccatggaggggggcagggtcgtagccgccgccagacgcctcgaacttctggaagaactgaaggcggaagtggaggcggctaaaggagcaggatgcatcctgccgcttcagaccgatgtccgtattcccgaacagatcgaccggatgtttgacgtctgcctggagagattcggacatgtagatgtggcagttaacaatgccggcgttctggacggacagcttcccattcacgagacatcacaggaaatctatgactatgtgtatgagacgaaccagcgtgcggtctacctcggatgccagcgtgccatcgagatattcctcaaacagggaacacctgccaatattgtgaatatcgcttccgcggcatctgtcagaggattgaaaggcggtactacgtatgtcatgacgaaacatgccgtcctcggtattacccgcaatatttccgccagcttctttgagcgggggatccgctgtaactgtatattgccgtgcaatgtcaaatccgggatcaaccgtgcggcccgcgagctgaatatcggtatcctggactggcagatgcgcgccggcaatgcggctccgatgcatacgatcacccctcatacagaaggggcgaagccgatgctggggcagcctgaagactgtgcgaatattatcacgtttctcgccgatgacgccgctgcacgctatatatccggagcagaagtcaaggtcgacgccggcttcctgaatatgtagacacagacagtcggaataagcaggaggccgccgcatggctatgatgttgaatactgacagtcatatgagcggttttgtccgcgcgatggttatataatccggaagaccgcgaaccattcaggttgtaatatgtagtgtgtttatccaatgtcataacgtactaagtgttaaagttatatcaattaaagctttagcacatataagcaaagctaaatgcaggaaaggaaggaaattcatgaaacttgtacaggacaaaatcacagttatcacaggcggaacccggggcattggatttacggcggcaaagatttttattgaaaatggagcaaaggtctccatattcggagagacaaaagaggaggtcgacaccgcactggcagagttaaaagagctttatcccgaagaagaagtgctcggctttgcgccggatctcacatcacgggacgcagttatggctgcggtaggaacagtggcggagaaatacgggaggcttgacgttatgatcaataacgcgggcattacgatgaataccgtattttcaagagtgacagaggaagcgttcaagcatatgatggatatcaatgtgatcggtgtgttcaatggcgcatgggcggcttatcagtgtatgaagggtgcgcagcagggtgttataatcaatacggcatctgtgacaggcatctacggttctctgtccggaatagggtatcctgcgagcaaggcaggtgtgatcggtcttacacaaggtctcggaagagagatcatacgaaagaacatccgtgtggtcggcgtcgctcccggagttgtggatacagatatgacaaaaggcctgccgccggaaattctcgaagactacctgaaatcattcccgatgaaacgtatgctgaaagcggaggagatcgccaacgtatatcttttcctggcgtcagaccttgccagcggtattacggcaacgacggtcagcgtagacggggcatacaggccataagagaagccgcgttataaaataatcataccttattgaaccgttaacgttcaataaatatacatagttaagcgttcctctggtaaaaaagagcaggcatgaaacttccgcggtcacaccgcgcgggattctgcctgctcttttactgtatgtcacaacggtatgtcatagccgtttcagtcagcgccgtctaacgcttccgtatctttatccttcagcgtcatgagaaattcttcccgcacagggttggaactgctctccatatagatgacagaacagcttgtcttaagtgtccgtcctgtgatcgggacataagaaagtccctccatgggcatggtactcatacacgcggggacgatgccgaagccgatatccgacttggcgagcagcgccatgctgtaataatcattggcatagatgacttcatttccgccgagtccgagaaaattcatgacattccaaatctgccattcataggacgtgaagtcattttctaccgttctaagcagaggttttccaaccagtctggaaggttcgagactggaagacgcagcgagctcactgtcggagcttagcaggaacagacaattgtcgcgcctgagagggacggatttcagccattggctgtagttgcggtcataatcagatacgaccgccagatccagaaagccgtcctccagctgctgaaggacttttttctttcgtttaccgtagatgagctctacctgggaggatggatgtcctttgtagaaccgggatacgaagggcgtgaccgccagctgttcatacgcgccggaatatccgatcctcacctgtggtttatcttcttccgacaactgccgggcatgggcgaccgcctgattgtaatcagccatgatatactggcagcgtttgtaaaggtaaccgcctgccttcgtgagggtcactcctgtgttgctccggttaaaaagctgaaacccgagttcatcttcaaattttttgatctgcaggctcattgcggtctgtgaaatgaactgctcgctggctgcttccgtaaaattcagatatttggctgcagatagaaaaaaggggagccttttgatgctcatggcggtacctcctgtcagtgtatcggcggggtgtctgtgatttaattgtaccatagatcatacttatagaacaccatattgttatcttgataaataaaggcctgcatgatacaatatgttgagatagttatagcctcagatgtgaaacaggacgggaggaattgccattatttctcctgtccagtttcatgttcaggtatttctgcggttcagcaagaggctgcccgtaagtcattaaaaattcgtgcggggatcataccggccggagagataagaggatgatatatgagtgcaaagaaaaagatattagtgatagaggacaatgccatcaaccggttgatgctttgtgagatcctcgcgccggaatatgaaattctggaagcagataacggacagacggcgctcgccatgctggagcagtgcagtgaagaaatatctctgatcctccttgatatcgtcatgccggtcatggatggacatacgtttctatccattgtagaaaagactccttcttatgcgtcgatccctgtcattgtgacgacgcagagcgacagtgaggctgatgaaatagccgccctttcaagcggagcaacggaatttgtcacaaagccgtacagaccgcaggctatcctgcgcagagtggccagtattatccgtctgcgtgagacagcggcgattatcaatcagttccagttcgacagtcttactggattatacagcaaggaatttttttaccgccgtgtaaaagagacactggagcagaacccggggaaggaatatgatatcctctgctcagacgttgaaaattttaaactggtaaatgatattttcggggtgcctgcgggtgaccgtctgcttggcagcatagctgcaatatacacaaagcttgtgggggaaaaagggatctgcggacgtctgcatgcggaccagtttgcctgtttgatggagcggcggtacgattatgcagatgccttttttgtgcaggcagatatggagcttggcaggacgagcaacatgaggaatactgtgatgaaatgggggatctatgccgtcgaggaccgcacgctggcagtggagcagatgtgcgaccgcgcgcttctggccgcccgcaacatcaagggacagtatggaaagcattattccagatatgatgatgaactgcgcaacaagatgctccacgaacaggcgatcacagatattatggaagaggcgctttcagaggatcagtttgtgatttatctgcagccaaagtacagtataagagaagaccggctggccggagcggaggcgcttgtacgctgggaacatccggagtggggcttccagtctccggcggcctttataccgctttttgaaagaaatggatttataacaaaacttgaccagtatgtctggaagaaaacgtgtgctgtcatgcaggaatgggacaggaagggctatcctcagatcccggtgtctgtcaatgtgtccagggcggacgtatatcaggtggatctggcagaagttctgatggaaacagtgcgcagatacgggatcgccccttcgcgccttcatcttgagattacagaaagcgcctatacagaagacccggagcagatcatcgacaccgtacgccatctgcgtaaactgggatttatcatagagatggatgacttcggcagcggctattcttctttaaatatgctgaatcagcttccgcttgatatcttaaagctggatatgaaatttattcagagtgagacggcaaaaccgatcgataagggaatccttggcttcatcatggggctggcgcggtggatgaaattaagtgtggtggcagagggcgtggagacacgggagcagctggagcgtctgagagagatcggctgtgattttgtacagggatattatttcgcccgtcctatgccgtgcactgattttgaggctcttctgaaaagactcgacaccgaagtctgtgagaatgagacgcagacgggaggcggtcaggaaagcgacgcggcgcagagttatattctgatagcagaagaggatgaagagcagcgccgtgaactgcgaaagctcttccagggcaggtatcagatcgcggaggcggctacagggcaggaggcgctgggatttatcgtgcgttttgaacgtgagctttccgctgttgttttaagtctgacactgccggaattagacggtttttcaattctggacgttctgcagagagaaaaagcggtctggaatataccggttatcgctacagggcagccggatatcacgctggaggaaagagcggtcgaactgggcgccgatgattttgcgtataagccttattcggccggtatgctggagagacgtcttatccatgcaatgaggcgcacgctgtcccgcgaacgggaacaggcgctgcaggaggaggcgggcagagatttcctcaccggccttctcaaccgccgcgggcttaatgcgtcagcccgccttgtgagaaaagaggatgcgcctatggcggtatatctgtttgatctggacgatctaaaacagatcaatgacacttacggacatgaatacggcgaccggctcattaaaaagtttggaacgcttctaagcgaacgtacgagaagctgtgacatactggcaaggttcgggggagatgaattcatcgctgtcatcaaacagatggattcaagagcgtcggcgcttaaaaagggagaagaaatctgcagtgcgttccgggaaggagagcttacggaacagtttgccacgagctgtacaggcggtgtcgccatctgggatgccgatatccccatcgccaatataatcgtcgaagctgacaaagccttatactgcgcaaaacggagccgtaaaggcggatgttgtctgcaaagagggagtgacatatgataacacaattaacggcattagagacagtagaaaaattttgccacagctggtttgaactgcgtgatctggagcttaccctttcttttctgtcggagaatgtaagctttgtaggcagcggagagggagagtcagcctggggaaaagaggccatggctgattatatccggcaggatatcgccgagatcccggagcctttttcctgccatatatcagtcatatatgagcagactccggccgggaatgtccggaatctgtccatggagatcacacttaaaaacacaatgtatacctggtatctgcgcggtttctatacactcgtcctggaagacagcagatggaaagtgttcagcatacatgttgcagagccaagccgcaatcaggccggcggagaacactaccctcagactctggtggtggaacatatcgcgcagcagcgccagaaacttctgaacgattccgttcccggcggaatgatgggaggatatatagaggaaggcttccctttctactttatcaaccataacatgcttgattatctcggctatgagaatgaggaagagttctgtcttgatattgacggcatggtcgctaactgtatgcaccccgacgaccgggacatggtggatacggaagtggccgcacaattggagaagggcggagaatatgcggttgattaccggatgaaaaagaaagacggttcttatatatgggtgcacgattccgggcggaaaacggtggcggaggacggcagggatgccatcgcctctgtatgtgtcgatatcactgcccagaaaacggcgcaggaggaagtgctccatctctataataatatacctggcggtgttttccggtgcagatttgatgatgatctatcggtgatcggagcgaacgacggtctgtatgaatttctcggttacagcagggaggaattcgctgcaatgggcaataaaatgtcggcggtcatccatcccgacgacttgggaccgatatccggcaatctgacggaacagttgaaacacagcaatgcgattcattatgagaaccgcgtcatctgcaaagacggaacagtcagatgggtgtcggtgaaagcccagctctttgcggagcagaatggggaacgtcatttctactgtgtgctcgtggacaatacgaaagaaaagcgtctgcaggagatggccaacgagctgtatgagcaggagatgacttattttgcagaactctcatccagggacggcgcttttcagggacgcatcaatgtgacacaaaataagctggaaaattacatatcaactgccaatgtggcggtatcccggacgggggacagttatgaacagacggtggagcatctggcctgttctgctgtagatccccattatgggcaggaactgcgcgagacattaaaacgggacaaggtattggaagattatgcagcggggaaggcagattataattttagctttctgtgcaggagaaaagacggaacagccttctggagcggctcaaatttccatacttgcctgaaccccgagaccggcgacgtgatgatgttcttttacacgcaggatatcacggagcaaaggctgcaggatcagctgctgaaaaagatcacaaaactagattacgatcttatcacagagatagacatcacaacatcgacgtacaggctggtcgggttttccgacgaatggaagcaggctgttttacagcagggagattttcagcaggagatccgccggatagccgagagccggatgaacgaggaagcccggaaggtatttttggaaaaactggattttgaatacatgaagtcctgtctggcccggcagaattcatatacttttatattggaacttacagaggaccgggggacacgggtaaagagatttcaggtgttttatattaatgaagagcttggccgggtatgtatgacctggtctgatgtgacagatgtggtgagacaggaacagcggcagaaggaagaattggcggccgcgctcgtggccgctgaacaggctaatgttgcaaaatcagatttcctctcccgcatgagccatgagatccgcacaccgatgaatgcgataataggaatgagtacgatagccgcccagtccattggagatgacgagcagatcgaagactgtatctccaagataggtatctcctcgaggttccttctgtcgctgatcaatgacattctggatatgagccgtattgagagcggcaagatgctgctcaaatccgagaggatacctacggaagaatttttaaacggtatcaactctatctgttattcacaggcagcggtcaagaatgtagactatgaatgcattatcgatccggttctcgctgattattatgtaggtgatgcgatgaagcttcagcaggtcctgatcaatatactgtccaatgcgatcaaatttacaggggaaggcggaaaagtgactttttccgcggcggagcgcaggaagtcaaagtccgatgcagttctgcgctttatcgtaaatgataccggtgtcggtatgaacgaggattttctgccgcatatatttgagcccttttcacaggagtctacaggtacgaccgcgctgtacggcggcacaggcctcggtcttgccatatccaaaaatatcgtggacttaatggacggaaagatagcagtgcgctctatcaaagggatcggcaccgaatttaccgttgatgttaaagtcgggatcagtgaggaagagaaactgcggcaccaccagaagaagcagaattataattttgctcatttaaagacgctcgttgtagacgatgacgtggctgtatgtgagagcgcggtcgtcacgctgcgtgagatgggaatcaccgcagaatggatcgacagcgggagaaaagcggtcgacagggtcaaaaagctttggggggaaggccggtactatgatatgatcctcatagactggaagatgccggagatggacgggcttgaaaccgcacggcgcatacgttccattgtagggccggaagtcacgatcatcattatgacggcctacgactgggtctccatcgaacatgaagcaaaactcgccggtgtgaacatgcttatgagcaagcccatgttcaaatcttctttgatatctgcctttacaaaagcgctcggagataaggaagagcagtcgcagaggccggagccggaggattttgattttacaggcaaacgagtgcttctggcggaagataatgccattaacacagaagtcgccgtaatgctgctggagagcaagggcttccaggtagaaacagcggaaaacggtctgcgcgcactggagatgttcagtaagtccgagacggggtattatgacgccatacttatggatatacgcatgccgatcatggacgggctgacgacagcttccaatataaggcatctcagcaattctgacgcgggcgatatccctatcatcgccatgacggccaacgcctttgatgatgatatagaaaagagcaaggccgcgggaatggatgcgcatcttgcgaaaccgatcgatccgggccgcatgtatcagacattgtatgattttatatatgataaggaggattgagcggatggatgaagttcaggagataatgaagtcttatggaatggacggcgaggccacaatgaggcggttcatgggtaacacgaagctgtatatcaaactgcttgatatgcttcctgccgacaacagtatccatgaacttgacgacgccctgtccgcaggcgatcttgacaaagcttttgaggcagcgcacacgctcaagggagttgccggaaatcttgggctgtcccctctttacgatgctgtctgcgtgatcgtagagccgcttcgcaaacgggaggcagtggaaggctacccggcgcttttcggggccgtacagaaagaatttaagaatgcccttgccatgctgaaggcattaaaaaactatggttagaatttttgcagggagggagaaaaaaggtggcagatgaccagaaaatactgttatttgagaagttgccgataccgaaggctgtaatgcagctgtcagttcccactgtacttagttcactcgtcatggtgatctataacctggctgatacttattttgtcggaatgatgaatgatccggttcagaacgctgcagtgacgctggcggcaccggtactcctggcattcaacgcagtcaataacctgtttggtgtcggaagttccagtatgatgagccgggctcttgggagccgggattacgataaggtcggcaggagttctgcatttggattctactgttcgctgatcgccggtctgctgttttcatttttgtgcttttctttccgcggtccgctacttagagtgctcggggctgatccgagtacagtggcggcaacactggaatatttacgctggacggtaatgtgcggcgcggctccggcaattctgaacgttgtaatggcttatatggtgcgggcggagggggcatccctgcatgccagtatcggaacgatgagcggttgtcttttaaatattattctggaccctgtttttattctgccatgggggcttaatatgggagcagcaggcgccggtctggccacatttttgtcaaactgcgcggcgtgctgttatttctttgtactactgtatgtgcgcagaaagaaaacagttgtatgtatatctcctagaaaatttggctttcggaaggaaatagttctgggagtctgcggcgtcggagttcccgcggcgatccagaatctgctcaatgtgaccggcatgacgatcttaaataactttacggcgccgttcggtgcccacgctgtagctgcaatgggaatcgcccagaaagtgaatatggtaccgctgcaggtggcgataggattttcccagggagtcatgccgctgatcagttataattatgccagcaaaaaccgggagcgaatgaaagagtctattatgtttacgatcaggacgatcgttccgctgatggttgttgtatcagttctgttcagcgcaggggcggggccgatcatcagtgcttttatgaaaaatgaagacatcatcgcctatgggacaaggttcctgcgcggcgcctgcctttgtctgccgtttctctgcatggattttatcgcggtgggtgtgttccaggcattgggtcatggacggaaagcgctggtgtttgccatcctgcggaagatcctgcttgagataccggcattgtatgtgctgaatttcctgtttccgctgtatgggcttccgtatgcacagtttgttgcggagtttgtattgtccattgcatcggttgtgatgctgaatcggatattcaagtcagagggaagtgcggcggagcagaaagataccggagagcaggagtctgtaaattaaatagttcagctttcccgaagcttcacagccgatgctgctttacgccgccggtcttcatctatggcagcatagtgctttttcgtcgtattgacatccttgtggccgagaacgtcggcgacaagataaatatcacccgtctctttgtatagtgaagtgccgtaagtgctcctcagcttatgcggtgtgatctttttgtttggagttacctgtctggcgtatttctttaccatattttccattgcctgtattcccatccgtctgcgctgagtagaaagaaagagggcattttcatggccggagagaggagtggcggcttttctgtctccattgatatatgtcagcaaagctttctcaacctcttctccgaaatagactaccatctggttgccgccctttcgcgtcacggtaattccattgttcttaaaatccacatccgtcagatcaagtcctacacattccgacacacggatgcctgtgccaagaagcaaggtcaaaatagccagatcccggtccttagtcttgtgataataagtcaatgcctgtccggataatttgcttccgcatgtttctacgtagtccagaagcaatgcgacttcatctgcgtcaagccgtatgatggccttgtcgtgcagctttggcatgtctacaagcaaagtgggattctttgtaattatctggtgcttaaaataatagctgtaaaagctccgcagagcggacatttttctggaaaggcctttttcactgtttgtgatcagttcatcctcatgcctgtatactttcagatattccatatattcctcaatgtctacgggttcgagcttctccagatctgaaacgtcaaactgcgagatcgtatgatttttatagttcggattggcctccataagaaaatgaaagaaaacccgtatgtcatatgcatagtttatcctcgttttagctgaagactttggctccattgcgcgaaaataatccctggcaaacggcggcagggtttttaagacttctctgagccgaagtgtctgattgatctgtgtctgttcatgatacgattttgattctgccataagaaataaattcccccttgttatcttgtcaggcatgtattgatgcctgaaaccccttgaattatggtaattatagcattatatgatttctttgtccatatcttttggaaaaatcggtatttgtcgtatagatgtattgcgcaaataaaaaagaaagtgtccggcacagtataacggcggcatgttctgtcatgcgttactgctctttgaacacgccgccaataggtgagtataatatatataaggctgtataagcttatatatccatctgaattacatacttggatcccggcactgtatgtgctgaatttcctattttatctatatttttatctatatctatctgaatgcagtatcataatacgcgatcgtcagatactggctgtcctggatatcgtcagacttgagtccgttgatctcttttacttcatcaatatattcaattatggaaccgtccttatcattcatatattcctcggcaattccccacagtgtgtcacctgactgaatctcgatacttttgtaatatctgtgttccaccggcgcttcgtctgtgctgccgtgcgcatcggcaaaattgcagccgagcaggatactcatgcacaacaccaatacgagtgccgatacaacaactgccagtttcttcatatatacttgtcttcttctcttgcctgccgcgtatgatctgtgtgctctcataactgctcctcctcattaccccttcttccaaacgaacaactgttctatatatagattatataatccgaacgcacgtttgtcaatagtaatcctgaaattaatcgaacatattttctaaacatttgtttgcttttttacttttgctatgataaaataagtataaaagcagaaagtacggataaaaattaaggaggtttcttatggcgcaaggtaaaatcagtcctaagcagcaggaaatattagaatacataaaggcacagatactggaacggggatttccgcctgcagtgcgcgatatctgcgaagcggtacatctcaaatctacgtcatcggtccactctcacctggagacgctggaaaagaacggatatatccgcagagacccgaccaagccgagagcaattgagatattggatgattcctttaattttacgagacgtgagatggtaaatgtcccgatcctcgggcgtgtagcggcaggggaacctattcttgccgagcagaatatagagaactacttccctattccgatggaatacatgccgaacaagcagacgtttatgctcaaggtgaaaggtgaaagcatggtcaatgccgggatcctggacggagattatgtattggtggaggaacgaaagacagcccgcaacggggaaatggtcgtcgcgctcgtcgatgacggagctacggtcaagacgttctacaaagaagaaggcattatccgcctgcagccgcagaacgatacaatggatcctattatcgtgcgtgacgttcagatattggggaaggttattggcgtattccgtttttttgactgatcccttacataacatagataaaatatgaaaaagagcgttccgtgactgtgttaatagtcatgaagaacgctcttttcctattttggcattttgttatgtcacctgatgtccgccaaagatgtttcggcagcctttccacgctgtcaatcccataacagcggtcagaaagatattcaaatatgacatcggtatgcgaaggccgcccagcctcatgtcttccattcctagcactaacgctgcgttgaaatcccccgacggcatgatggaaaggaactggttgagcggcagaatgtccagtttatcaatcagtacgatcggaacaatgtacagcagcagggcgaccagcacagctgtaaatgcattttttgataacgcagatataagcagtgtgatgcaggtgagaagcacagcgcctattaccgcgaatattatgacaagtatcatagcctgcagacagctgagtgtgcgggggactgtccagaacaggccgtgtgcggctgcctgcaccgtcgcatcccatccttttatgccatattgtataagtattgccccggccgggagggcgatcgtgaaaagggcaagcaggacggaaaagcagacggatgctgttatcttagcccggatgcacgtgctctttccttttttggctgtcagcaggagcgcgtccataccgctggaatattcctccgagaaaacaggcgccacggtgatgacgatcagaaacccggctatgagaagcatggattccatgcatagcatagctgtctcccacccccttgtatacccgatctgaaatggctgctctttgatctgcgggtaagcggattcaatgtcttcctcagtcaaaggtttcaccttatcccacaattcccatacaaacatggacgatatggattttgtcacccagtctcccttgtaagataattcctccgggctgccggagtctatggctgcctttagaatatcatttaccttgtctgcattcagctctcctctgtacttatctgcaattgttttttcatacgccgcggctttcctgccgtgatatgtcgttccatccgcagtttttacttccagatagtcgatgcgctgattaagcagcaatatgatcataacgagcgtgtaagccgcaacggcagccaggatgagctttttatgaattagttttccgaattcaaagcgaaacagctgtcccataagtgtcctctcctttcccgctgaaataatagagatatatgtcttccagcgccgcctctgcttttaccgcctcctcagcaggtttttcctcagatacaatgcgcagtacggtcctgtctcccctgctttttacatttacgactgtataagtctcctccattttggcagctcttgatgcgctgacctcacattcccacacaaagtctctgatatccgaagtgatctcttccagtgttccggttttgataaaacgtccttccttcatgatgaaaattttatccgcaatatattcaatatccgccacaatgtgagttgagagcagcacgatcttatcttttgaaaatgagctgataaggttgcggaaacgcacgcgttccttcgggtcaaggcctgacgtcggttcatccagcacgagtattttcggatcgttcagcattgcctgggcaataccgagcctgcgctgcattccgccggaaaaggttttgatctttctgtctttctcagacagaagccccgtaagctccagcagctccatggatcgctccgcagctgtcattttattgagcccttttaacgctgacatatagagtaagaacttaagtgctgtaaattcgggataataaccaaacttctgaggcagataacctaaaataccgcggtagtcctctcccatcatatgaatgtcctgccggcagtagtttatggagccggaggtgggggcgagtatgtcgcatataagccgcatcagcgtcgtcttgcccgctccgttggccccaagcagaccgtaaatgcccggtgtcaggcacatactgagctgatctaccgccagtttggcgccgtacctttttgttatctgttctagttgtaattccataactcatcccatcctttctctttctgtccgataaacctgacatataaatatacctgaacgctaagaaggatcatgctggcagcaagcgcggcagcggttacggctgttgtctgaatgccggaaagaatctcctccagcagaacataatacttctgcatgtacaggcagatgagacagagaaagattccggcgcatacaaggatataattcacattgttgttccttattctgcgtatcagatacatgtacacggaacaggatacagtgaaagggaccactacccggagcagacagctgtatggtgcagtaccggttttcactatgaccgccgaaaggacggccaatatgaacgtatcggccagcccgaatatgagaagtctcatgcagcatatgtctttcaggttatatctggatgactgctccagctcccacattccttccgaaaagctgcgggcgagcactggaaatacagtgatgcctaacaccggggaagccactgacagcgtggtgagtccgtttgagtgcggagcatgcacgcagatccacagtccaaatataagaagtaagctttctgtcagccagagtgaggctggaatataggccagctgtattttcagccgcagccagaatggagtcttctcctttttatgctctttccctgcctctgttttcagtttgtaaagtgcagcgtttttccggccggaactgatatccggagggctgtacgcttccagaagcgtctgcagttccttttctttttttgataaagtcaattgaattcctcctcatccagcagtttccgcagcttgtccatgctttgccgcagcctggatttgaccgtggggatcctgctgtccgttatcgttgctatttcctgtatcgagagctggtggtaaaatctcaaaatcaccacatccctctgtatccggggcagtttctcaagtgcggccctgatgacctggccgctctccatacgggcaagatttttatcctcttctgccctgccgggggagagaccgagcgtgacagcttcttcgggaatctctttttccttacggaaatgatcatagcagacgttccgggctatccggaacagccacgctttgaacttccgcttttctgtatatgtgccgtaaaaccggatcagccgcagaaaagtctcctgggtgcagtcatacgcgtcctcttcattgcctgtcatgtaataggaaaaacggaaaatctcgtcataatactgaagtatctttttttcgtccagtttccggcaccttctttctgtctgtaaaacgtcttacatataaataacgcataaaatcgagaaaaggatttaaaaaagaggaatgttttttcattcctcttatcatgctgcattaattcagtttttcacgttccacgggcgttccgtcgctccagattcgttccaggttgtagaaagaacggttttctttctcaaacacgtgcacgatgacatcgccgtagtccatcagtacccatgagccgctgttttgcccctcctgctgtctcagcgtgtaaccggcctttgtcatcttttcatctacattttctacaagcgcctttatctgactgtcgcttgttccgtcagtgataataaaataatccgcgagaacagatacaccggatatatcgatgatctgtatattctctccttttttatcagataatgcatcgtatgcgatgcgggccatttccattgcgtgttccatacaggctattcctcctttttgccaagtttttctttataatattgatatgctttttctgtcatagggtcaatgggcatatttttggagtccagatagacgagggagtctttcaggatccggtaaaggcactcatcgatatcggaaaatgcaagctttctcaccgccgccatattggggagctcttctcttccaggttcaatatagtccgaaatatatataatcttctcaagcagtgtcatatgtggtctgccggtcgtatggcttgctatggcgtcaatgacgtccttatcgcggatatggaattttttggcggcgaggtacgctcctagtttcgcgtgaagaaggcttggattggcaagctcaatatctgacacgctcagatgataccggtcacagagctttatttttgtatccggcgcgatacattttgcacagtcgtggagaagtcctgccatgagcgcctggtctatgtcctcatcgtaccgcatagccatggctgccgcagtatacatgacgcccagcgtatgttcatagcgctctctgtcgaggtctgcctttatccttctgcgtattctgcttatcttctgcttcatattacacttccttatatagatgatgtttcttaatatatgcgcggactttgtccggcaccattgcccgtatgtccccgttctgctttaatctcatcctcagtccgctggatgagacgttcatcagcggagttgcaagcagttcgatcctcgcattatatttatccctgagataattgatctgcccgcacatctcttctttcgtatctatatcgtctctgtaagcggcgagtatcgtacacgtcggaaagagccgctccgggtggacccagctttcaatggcaaaaagagaatctgcgcctataataaagaagaactcacagttctcgtatacgctgctgaaatgctccattgtatcgcaggaataggagacttcctttttcatcgattcgtattgctgaagtttaaaattatcgtgtccttcgatcgcaagccgtaccatctccacccggtcttccacatctgattctatagatgaacggcgcttatgcggcggatttccgtttggcatgaaccatacttcatcgagcctgaataactcgtatgccgcctcgccaagcatgagatgcccattgtgtatgggatcaaatgtacctcccataatgcctattttcatttatctgacctctgtttcggtaattggtttacataaataaattatggtaactcaatgcgcttgtttttatcttttccttctctgtaaaggactattttctttccgatgacctgtacgacctgtgattgtgtacgctctgcgagaagctgtgcgatctctttaggatcatccgcgcagttcttaagtacggcgactttgatgagttctctcgccgcaagcgcctcccgtactgcctccgtcacttcgggggttatactgttctttccgacctgaaataccgggtccattgtcatggccaggcttttcaggtacgctctctgttttgtcgtcatagtaatgtcgctcctgttctatttataataatcaaactgtaatccatacatccgcactgtatcgccttcctgtatgcccgcttcttcaagctcgtccagaatgcccgaatccttgaggaacttctggaagaacgcaaaccctttttccgaatccaggtttgtgtaaccaagcattttctcgatcttgggaccttccacaacatacatgtcatcctctttttccacggtatacggcagattttcgtatataagctcattctccgggaaatattcctgttcaaagatgaccgggcttctgtccagctttccaagctgttcagatacataatacagcagttcgcttatcccgtccccggttgcgccggaaatcgcaaatacccggattccttttggctcgaactcttctttcagcagtttcacaggatcctcactgtctccgctgtatatgagatctgtcttgttcgcggcgatgacctgtggcctttttgcgatgtccggattatacgcctcaagttctgcgtttattttatagacatcttccaccggactgcggccttcgcttcccgctgcatccactacatgtatcatcatcttcgtccgttcgatgtggcgcaggaattcatgcccaagcccgactccttctgaggcgccttcgatcagccccggtatgtcggcgatgacaaatccctgtgctccgtcgagatccaccaccccgagattcggattgagcgttgtgaaatgatagttggcgatctttggtcttgcattggtcactcttgataaaaaagtggacttccctacgttcgggaatcctataagccctacatccgcaataaccttaagttccagattcacccacaactcctgggaaggctgtcccggctgggcatactttggtatctgcatcgtagctgtggcaaaatgctggtttccaagtcctcctttgcccccctttaacactacctgccgtttattatccccggacatgtcagcgatgaccttgccggattcagcttcttttatcaccgttccttccggaaccttcagcacgatatcatccgcgtccgcgccgtggcatctgcgcttaccgccctgttctccgtcgttggccgcgtattttctcctgtggcggtaatcctgaagtgtgttcaggccttcatccacctcaaagataacatcgccgccccggcctccgtcaccgccgtccgggcccccgttcggtacataaagttccctgcggaaactcacgtgtccgtcgccgccctttccggaacggataaatatcttcgctctatctgcaaacataaaattttcctctttctgctttctgtcatagtcttactttatatgatgctcaatatatatcatatcatgactgaaacattgattcaattggggacgggggaaaattaaatttcccccgtccccaattgaacctggttaaaataaccctgccagtgtctggcagggttattcgtcaactcactattgtgctgctgggtagatagaaacctgtttcttgtctcttccttttctttcaaatcttacaacgccgtcagcaagtgcgaataatgtatcatcgccgccgcgtccaacattcacacccgggtgaatcttcgttccgcgctgtctgtaaagaatatttccagctttaacaaactgtccgtcagctcttttcgcaccgagtcttttggactctgaatcacggccgttcttagtagaaccaaccccttttttatgagcgaaaaattgaaggtttaatttcatcatgtttttacacctcctcaaatataatatcgatgtatcgcgtgtaatcttcgtcgtcttccatagctgtcagtccctggaccatagttttcagaagaagctctgcttcttttgacggatattccgcaagcatacattccatactgccgctgctttcttcagtctcaagggaaaacttgtctccggtgtactgctcgatcgcgtttacggtgttgatcatcaatatggatgccgccgcgcatacgatatcctgtccactttcattctgtcctgcatggccggaagctttaaatcctacacattcattcttttcattgttatagatagttaccttaatcatcggtcattcccggattaggcgttgatcttgtcaatctttacagcagtatactgttgtctgtgaccgtttttcttatggtatccagattttctcttatacttgtaaacaatgacttttttagcttttccattttcaactacagaagcttctacagttgcaccttcaacggtcggattaccaacctttaaaccgttgtcgtttactgcaagcacttggtcaaatgtataagtctcgccggcttctgcaccaagtttctctactttaatgatatcgccttcagctactttgtactgtttaccacctgttgctatgatcgcgtacatatggcacctcctattatcattactcgccaattatggtggctgcatagaaaagcagcgctttaaaacctcattgtgcggcatactgttgtattatagcatagacttttgtcaaaatcaaccagaatatctcttttatttttcaaatacatttgcgctcattcatatttccctttcacctgtttacggccatttaagatacggtcattcttgcaggcgaaagaacggaacctggcctttaaaagcagcctgcggccctcaggggttctcgtatatatggcctcatagtttccaagtaccctcttcatgcacatacgaaacgtcatggcatcttccttgttcctgccgaatatttcaggtacggcataacagtcgctgatcttgcctctccccttctttcgcgccagaatatatctcggattgtcgatcacgccccaaaactgcgcaagacattctgcaaacaaagtcttatcccgtgtagttccgcctttcaggcatgccagtaccagaatctcttcttcttttacttccgatctgcagtgctgaggttcttctatctttccggtctggacaagcgcgtccaggattccttctgcggccctcttcatccgcttctgcggtgtacagaggcggatgatccggaagccgtatttacctgcaaaggctgcggctgcaaggaataaaactccggcagccgtaaaccaaaaagaagcatgttccagtcccgctgttataaatattctaaaaaacagaagcagaagcatccagacgcacgatactatttccattacaaccgcgttcagaaaaagataacccggtgccagtatctgtttgtctacttcccggatttcctccacacacatgtcgtcgtggatcacttttaaagatttttcccaggaacgccggagttcatcccgttttctggatcttgcaagcatatttttgttaatgcttctgaaatcgttttctgcgttcagatatctgtccagtcccagtctttcaattccgctttcaataacgtcctctttgtaggaaataccgagaaaggctccgaatctgcgcaccagtgtgtcgtagtcccccgccggtgcttcttcagaattataggttgtccggcccggaaggatacaggcaagatgccagatattactcgtcttgtccggctgctcgttgcatgtgcggatcgcgcgtccgcgcatctggttgctgagcatgaaggatcctacgtaggtagccagaatcagtgaattgatgcagggcgaatcccagccctcccccaagagtgactttgtaccagtaagcacatggatacttcctctcgtaaataactctgttataactgcgacgatattatggctgcttccttttaccgtcagacttccataaccggtatcctcaagttctgcaagcgccccttgcaagccgtagacgtcaagcagtcccataagttcatcctccacatccatcggcacgatgatcacgcttccactgagcacaccgagacgtaagccttctataccggctcttctcacatactcaaatataggaactgccccaatctctccggtaaaagcttctgtacctcccactttactcagatattccttttttataaaatcacaaagtatcaaaagccgcaggccgtttcccattccggcatattctgatttgacaatttcccggatactgttcagtttccccctgctcttgatcagtaatctgtttatttcctcatttcttacgagccggacttttctgcggtacatacagccggcttccttcagtctggcgatcagcccctctctgtacaccgtatccgccggataggccgcggcatcatcgtacaggaagccctggagcagcacctccagccaggtattatcaagtctcgggagatgtgcttttgtgccggtcagtttcttgagatatggtgaaaaaggaatttccatttcctgcaggaagattaatatcgaagaaaaatatctgggattgtccaggaatttttcaccgtactcttccggagcccgcagtccttcatgggctgagatcatcgcttggaattcccggtcctgtataagttctctgacaaatgcttccgcctgctgtgtgtatccttttacagcctccagctcctcctttgccggctgattgaaataaacataatcctgatgcgggcacaggctgccttcctttaccagttccggtgtaaatatctcttcgtcgatcggaccgcacagatcgatatatcttttccactgagccggcgtactgtcataaggcggtgtggccgtgagcgataccagttttacgtccggcacattcttcaggaattcttccagcgcccgccaccattcactgcggagatggtgggcctcgtccagacagagcgtccggattccattctcacggatcacttcgtagatgtcaaaattcttgtaatctaccatttccgtgttcttctcttcactttcttcttctgaatcctccagcagtcctgtatattgcttcatactgctgtaaagcgcctggtatgtgatcgctgtgatcatttttgccttacggatatcattagaaaaccacttttccgcatcttccccttcggtaagaaacccttcttccagccgtgcgatccactgttgccggatagttatactcggggacagaatcagacacgggttcccaagtcttcggatgagttcaataccgagcgttgtctttccggacccgggagcagccacaatgtgtactttgttgtcggacatatacgcttcggagtgatgaagcacacgctcctgataatctctccatattcctttgaattctaatacgccgtcaaagatgttcatattatctgttccttatttcatatttgggatatttcatatttaacatggtttactctcaggcattacatttgcgtaaataatgcctcccattatgatcacagcgcctgccgtctgaagccctgccatccgttcaccgagcaggacgaaggatgccgctgtagtaaaaacaggctgagagcacatgataagagcagcctttgtagaatcgatcttactgagcgcaaagttctgcaggcagtaactgataccggtgcagccgatccccagatacacaagcgcgccccatgctgccgccggcacgcctgtaaatgccggcataacctcattgttcgcaataccgaggacgagacagacaacaccggtaaagccggactggtatgccgccagaagcaaaggctccatatgttccagatagtgggaactgaactcaaaaacgcaggcgacgagaaaagaactcgttacagccatagcctctcccgggccgaacacaaaccctccgctgccacagcagagcaggtacgtccctgcgactacaatgcatatcggtatgtattttttcttttctatttttactttagagatgaaccgcatgagaaacggggtaaatataacaggaagcgcaaacaggaatcccgcgctggtcgccgtcgtatatttgaatgtaagcgtcccgaggatatacgcgcctgcgttcagcgccgcgatgagcgtaccgggcatccagaaggaaggcttcatccccttaagtatctttttatgaaacaggagaatgagaaacaggcttcccatgaggaagcgcacggccacgtacaaaaagaacggaaaggacgacatcccgtacttggcgattggattgccgacgccgagcagaatattctgcgtcaggatcagggatccatagaaaaggctgcttttctgtttcatatcattttccctccgtcatttctgcaaaaccacggttacaggtcgtcgaccagtgcgctgctcttggcataggcggtgctctttgcctcaaaaaaatctgtctttattaaattggcgttggagtactgctccacccagcgcatactctccggtattgtgtcatacccttcatatatacgttcaaatccaagtccggtacatctgagatttccgagataccggatatagcttgttatcatatccttcgtcagaccttgtatcttatctccgatgacataatgtccccaccgtatctcctgttcacagccttcccgtatcatttggcggtacatttttatatcttccgcagcaaacagctgtggttcctcttttttcagctcctggagcatgctgcggaacagccacagatgcgtgttttcgtcccggttgatataacggatctcctgtacagagccgggcatcttctggtttcttccaagattataaaagaacataaatccactataaaagtatacaccctccagtatataatttgcaataagagtccgtacaagcgaccgggcgctttttgtctcctgaaactcattatacaggctgccgataaactcattgcgcagaagcaggtgttcgtcctccttccactggtacaaaatctcctctctcttctgtggttcacagatggtgtccagcatgtaactgtagctctggctgtgcaccgcctcctggaacgtctggatggacagacagagattgatctcatttgcggtgatatattctcctatatgtggaagatttgccgtctgtatactgtccaggaagataaggaaagaaagaattttgtcgtaagccctgcgttcctcggcgggaagatgagggtaatccttgatgtctactccgagactgatctcctccggaatccagaagttattcatcgtctgcctgtaccagtcgctgacccacgtgtatttcatattattaaagtcattcagatttgtcgtattgccgccgatcatccttctgcttcggacatccgtatctccgtccggattaaaaagcattttctttatcaattctgccataatattctcctctctgtcaaacatgccttacgaagagcatacatcacactcttccacttccagacttctggaacgtatataatagaccgttttaaccccgcactcccatgcaaggagatacagatcgagtacgttccgaaaagtatattcgtttgtaatgtacaggttcatgctctgcgcctggtcgatatgccgctgcctgacaccgcaggcgcgtacagaccatgtctggtcaataagatgcgcattcttgtaataccagaatgtatccatggataactccggagccacccttggcacgagtccgtttttcttttcctccagatagaacctgtgcatgataggatcaagcccggctgtagtgccggcaataatactcgtgctgctcgtcggagccgcggccagcatatatccgtttcttacgccgcaggaggctgcccgtgcgcgaagctgttcccaggccgctccggtcagcttccgcttgtcaaagtaagcacccgtctgccagtcacttccctcaaagcaggcatagacacccttttcttccgcaatatcacaactcgccgctatagccgcacggtgcagtgtgtcgaacaccttgtcggcaaatgccaggtgctcttcgctttcccactggatcccatgttttgcgagcatatgatgataaccgctgacgccgagaccgatcgggcggtatttttcattgttcagctttgcgtacgggaccggaaagaagttgaggtctatgacattgtccagcgcgcgcatggctgaggatacggtgcggtatatttctttttcatccgacacgtcaatatgtccaagtgacacgcttgccagattgcacacgacaaattcaccgggctttgtgacagttacgacaacggtctctccgtccacggtctcgatactctgcctgacctcttccaccgcgcccatgttctgtgcgatctccgtgcagagattgctgcagtagataatacccttgtggccgtttggattcatccggtttacctcgtcgcggttgaagacaaacggagtaccggtctccacggcgctgcgtatgatgagacggatgatctcctttatgggcaggacccgcttggatatcctctcatccgctacacagtccagatatttttcttcccattctttgccgtaacagtcctcaagcgcataccctttcacagtcagtacctcgtgggggcacatgagataccagtcgccttctatatgatccctggccattttccagaaatagtccggatagcagacggccggaaatacgtcatgcgctttcattctgtcgtcgccgttgttcgtccgaagcttcagaaattcagggaggtctctgtgccatacgtccagatacacggcaactgccccctgccggacgcccagctggtccacggcaactgcagtgtcatttgcaagcttgatccagcggataacgccgcccgccgctccttcaaacccgcggatggcactgccccttgcccgcacttttccgaaatacattcccattccgccgccgtatttactcaccttcgcaaagctgtcaatgctccggtaaatgccgtccaggctgtccgggaccgtgtcgatgaaacaggatgagagctgatggtagggctttctggcattggaaagggtcggagtagccatcgtcaccttcagaagactcagcatgtcataaaaccgttttacccattctgagcggttttccttttctttcatggccagatgcatggcgatacccataaacatctcctgaggggtctcaaggataacaccctttcgtgtgcggataacataacggttaagaagcaggtcaaggccggagtatgtaaacagccggcttcggtcttcctcgatcagtttggcgaacgcttctatctcctgtctgctgtaatgttccagtatataactgccgtacaggttctcttttgtcagatatacgattttttcataaaagcttctgatgccgcggcttttcatggcatcctccaggctgtcgcgaaaaccggcatacaaaagccgtgccgcgatcatttcccagcccggcgcctcctgggtcgtgagttctaccgcagcctttgtaagcagggaaagctgttctttgtccgtcagcccgggtttttgaagagacgcgtatttttggtacagctgtgccaggtcatattcaggctctttgaaatctccttgtatatgtgcaagaacttgatttagtccttttatttttatgtcttccattgttcttcctccatatatcgcaatttattgtggatatatcagatgttatcacaacatatagtatttatcaagatgaagttctttccacaaaattcctgctttattctgccgtggtaaaatccgcatcaagaatcgcttgacttaagcctgtctgtaagtatacattaaaaggtagaataatacgcaaaggagtcttacatatggaacatttaatcaccccggacaactacacatctcctcttactatccgggaaactgaagttgcgatcaaagaagtgaaggaccactttgaacgcgcgctggccaaatccttacacctgacacgtgtctctgcccctctgtttgtaaagcccgagtcaggtcttaatgataatctcaatggagtagaaagaccggtatctttcggtatcagggaacaggaggatgcgccggctgagatcgtccactctcttgcaaaatggaaacgctacgctctgaagcgctatgattttcactcaggggaaggtctgtacacggatatgagcgcgatccgccgcgacgaggataccgataatatccactctatctatgtggaccagtgggactgggaaaaggtcatctcaaaagaggagcggaatacagagacacttcagtacacagtacgtaaagtatattctgcgctgaaagagacggaagaattcatgtcgagaagatataactacatagaaccatttcttccggatgaaataacctttatcacctcacaggagcttgaggacttgtatcccggcgccgacgcaaaagaacgtgaataccgcattgccagggcaaaaggcgctgtgtttatctcgcagatcggcaaggtgctttcctccggtgaaaaacatgacgggcgtgcgcctgactatgacgactgggaattaaacggcgatatcatcgtatactatccagttctggacattgcgcttgaactttcatccatgggcatccgtgtggacgaggaggcgctccggcgccagcttaaggctgccggctgcgaggaccgggcagaacttgaatttcagagactgctgcttaacggacagcttccctacacgatcggaggcggtatcggccagtcccggatctgtatgctatatctgaggaaagcgcatatcggagaagttcagtcgtccatatggccgaaggaaatgcttgaggaagcttcttcacacaacataaatcttctgtagaacagaggttaatgatagagggaaacggccgtgggttttaccgcggccgtttcccttctgtttatgggctttagtctggggtaaccaagtagtacaacgccctttaaagggcggcgacgagtcaagggtatagtagtttaaacaaagtgaaagccagcgtctttaggcgctggccggtaacagaggcttatagcttcagagcaaaccacccgttttacggtttccatactttacacgttctgcctccgccggaccgtgcctgtgctgcagacatgtaagtaagagaactgaagtgctgatacgatacgtagtattcctttgttgttgttcagttttttcgtatgatttgattccctttccgacagatcgtgagatggaaatattgaactattgtcttctgtatgattattcattttggtcgctctgtgatttttttgggttcagctgcagtattacgagcgcagccaccacacatatgattccgacaaggttaaacagatcgagtgtctcgcggtacaggacaacgccaaaaaggcttgcggccaccacttcaaaggacgcaataatagacgctttactgctctcgatatatttaagagccgttgagtaacagatgtacggcagcgcgagcgtgatgacacttccaatgaccgtcacaggcatttttgaggcattggaggctatgatccttcccatggagagcggttgtgcaatgaggagcgatgcaatacttgcaaggataaaggtatatactgtgacagtgagcgattcatattttcccattagaaccttgccgaaaatactgtaaagcgaatagccgaagcctgcgctcaggccgatcagaagcgtgacgagtgcgttatcgcctacattcgctcctgaaagccccacaacaagtatacatcccgcaaacgacaggaacaaagctgctattttctgtaccgtcagcttttccttaaaaaagatgacggacatgatcatgacaaaaaacggcgcggtataaagaagcactaccgccacggagagagatgccctctgcacagtggcagcatatgccagattattgataaaaagacttccgaggccggtgcccaggaaccatttgagatcctttttgtctatcttaagtttgttccggtctgtgataagaaggaacagtatgaggacgaccgctgcggacgttatccttactgcggcggtctgtcttgtgttgaaccctattgccgccacgtatctcgtgataattcccatggagccccaaagtaccgaggccattaaaacaaatacaggtgccagtcttttcataggccattccctgccctttcttggtttactgaagatcaagaagccgctgcgcattttctcccaatatactgttcttttcttcgtcggtaaggtccatagatttcagataatcgacaaactccttctgtccggcccatggagaatctgttgcaaacagaattctgtctgcgccgtgggtcctgacaattctaatgaactgctcgtcggagatcctgccgaatacaacgcctgtgtcaaaatagacgtgctttccgacaagacactcttctacttcatcccactgaaaattgccgccgagatgggcgagcacaagtttttccggctgcacttcacggatgagctccgcggccatctgcggggtacagtgaacatcgtccggacatttcgggtctttcccggcgtgaacacttatgataaaaccaagttccgaggcatactcgacgatccgtttatagcgtatatcgttaaaatatacttcctgataatccggatgtatcttgatcccttttatccccatatctttgatctgtctcagctgttctttatagttttcactgtcagggtgaacgctgccgaatgaaaggatactgccattttggtgttccgatgcaaaccggttgatggatgcaaactgtgacggctttgtcacgatgggaagtgcaacgcttaaatcgaccccggctgccttgccggatgccttcagtccttcgtacgtaccgtctgtatatggttttatgtggcagaccgacccgagaaagtcaagcgttcctgccgcgattttgtcaggaaacatatgtgtgtgaaaatctatcgtcattgttctcatccttttattgttatatctgtccgtccctgcctgcaggggcacgcattgttcagcgtttatcacagtcgctcagtttattatagcagtagccgataatatcacggcgcgtgataatgccgataaaatgctcctcatcatccactacaggaacaaaattctgctccatggctctgccgatcagatcttccatattggattctgcgttgacgcattggtagtctagtcttcggtctatcttcatgatactgatatcctcagcgtcgtggagattcatcagatccagccgcttcagtccccacaacaggtctccctctgtgatggaaccgacatatttgccgtccctgttcaatatgggcacggaagaatatttgtggtattccatgatctcaagcgcctgacggagtgtatggtaatcatatatgtaagccagctcacttttgggtttcagaaaaaataaaatattcattgcagacctccccttgtcttattatatctgcgttgtcacaaaaatatcgtacagtgcccttaccgcggcttcaaaatcatggtttcgtacgccgattatgatattaagctcactggagccctggtcgatcatctttacatttacattggcgtgtgccagcgctgagaatatacgtcctgacgtgcctctggtcgcgcgcattccgcggcccacgacggcgataagtgcaagatcagattccagctcgaggaaatccggttccacggccctgtgtataccggcgatcactttctgctctttctcctcaaattcatcctgatgcacaaaaatcgtcattgtgtcaatgccggacggcatatgctcgatagaaatatcattatcttcaaatacttccagcacttttttacagaatccgacttcggagttcatcattgctttttctatagtgatagaggcaaaatcttttttcccggcgataccggtgatcgtaaacctcggcttgcggcaggttccttctactatgagtgttcccttatcttccggaatattcgtgtttcggatattgatcggaatcccctcttttcggacagggaagatggcatcctcatgcagtacggtggctcccatgtaagacaattctctgagctcacggtatgtgatgacatcaattgctttgggatttcggatgattctcggatctgcgatcaaaaacccggacacatccgtccagttttcatacatatctgcatgcacggcttttgcgacgatggaaccggtgatatcggaaccgcctcttgaaaaggtcttgatctttccgttaggcatggcaccgtaaaatcccgggatcaccgcacgttctgtctctgcaagtctttcggacagaagcttatctgtagagaatgcgtcaaattcgcctgcttcatcaaatacaatgatctctgcggcatcaataaactcatatccgagataagcggccataataatgccgtttaaatattcccctctggaggcagcatagtctctcccgacttttttgctgaaattttcttctattattttgaattcagcgtccagcgacaagtccagttttaggccctttatgatgcctttatacctcgcctttatctctttgagctgctcttcaaactcttcctctatgatggcctggccgtaacagctgtacagcatgtctgtgacctttgtatcattcggcgttcgcttcccgggtgcagacggaacgacatagcgtcttgagtcatcttttttgattattgctcctgctttctcaaactgcgcggcacttgccagtgaacttccgccaaactttacaactttcttcatcttttctgtgatcctccataactgccattgttttcttgcgtaattctctatctatattacatcattttccgagcatccgcaatggaatatctgtagtaaataacactccgtttatacctgacttctgtgctgcttccacattttccaggcagtcgtcaaagaaaagagcttcctgcggttctatgtcataccgctttagaagcaggctgtatattgcgggatccggcttcatcatctgctctttccaggagaatatcccaccgtcgagcatattgagaaatgaaagctgatcctttgactgacggtacatctcggctgaatagttggacagatagtagagccgaacgccctgatctttgaagtattggatccactgttccgtgaaggaatacggaaggatggagcgcccgaaatgtgcgaagacttccctgatctggggctctgcatccggtgcattttcgataaacagttcaagccatttctctgtcgtgatcagaccggaatcgcccatgttccagtcttcgttccggaacatggcgtccgccactttctcgtacatgtcgggactgtaccggaacgaagccaggtagcggtcccaggcaaagtcgatgaggacattgccgatgtcgagtatcactgcatcaatatttttaccaaggtattccatctgtgtttcctcctgtctactgtgctgcctgttttggttactcgtgtatgacatcggcatacgacgcgtctgccgctcttctaagatcctccggcgcaagtttcagctgcatgccaagcttacccccgcttacatacatatgagaaagagattgtgccgattcctggatcaccgtcggatactgctttttcatcccgatcgctgtgcatcctccgcggatatagcctgtcacctttgtcaagtccttgagatgcagcatctccagcgacttctcgccgacgacgcgggcagccttcttaaaatcgatctccgcctcgatcggaatgacaaacacataaaagcccccgctcttcccgacagtcacaagcgtcttgtaaacaagactgcggtctgtaccaagcatgtcggcaacctggagcccgtccacaaactcatcacattcgtaagtatcatactcgtacgagatcttcatacgatccagaatgcgcatcgcattcgtcttaacttccttcttgcccatagctcctccttttttgaaaggggtcagacccctgtgatacgaaggggtctgacccctttcaaaattctccttattttcagacttctaagtgaattggttatcgtcaaacaaacttaactgttcacacttatatggtgccttgtagttgtgtatgatatctttcatactgtataaaatctcatttttttcgcattcttctttgaaacatgtccatagctttcctgctcttggacttctgcattcataatatgttccgtaccgcttgttatatttttcggaaagcttctctccgggaaacaactgatccagcttttgcagataccactgccgttgattattgcgcagtgtcacaccaaatgcaggatagataaaacgtgcgccgcattgcgcagctctacggacaattgcacgtatattgtcgtcactgtcctccagaaatgggaggaccggcatgaggagaattccggccgggattccccggccggacaactcgccgagcatatcaaaacgactggaagataccggcgccccgggttcaattttggaagaaagggcgtcgtccgccgtagtaatggtaactttgcacagaacaggtgaatgttccctgatactttccaatatatcgatatctctcatgagcaaggtactttttgtcgcgatcgtgacgccgaattcaaatgcatcgcacaattcgagtgcatgtcgcgtcagcataagttctttttcatacgggttgtacggatcgctcatcgctccggtagcaatgaccccttttttcgtcttcctccgcaaatcatctctgattatctgtagcgcattttccttagcacggacttcgtcgaacctgtcaataccgtaacagtctgaacgactgtcacaatagatacagccgtgacagcatcctttataaatattcatattataatccgcaccaaaccactctcctggtttcttcatacgcgtcacaatcgtttttgccggtatatattccataattttcataggggtcagaccccttcatatcacaggggtctgacccctatgaaaattctctcctttttctgaattcttctggtctttttattataactgtgatatcatgtttgcacaataagaaaggaggtaactatgccgagaaaaccgagaatgcgaagctctacagatatgtatcatattacaaaccgcggcatcaacaaagtcaacatcttcaactctgaaaatgataagaaacagttcttacgtatcttacataaaacatgtaaacagtatccaattgaaatctattcttattgtgtaatgtcaaatcatttccatttgcttctgagaattccttttgccgagctgtccgctttcatccaacagatttccactacttatgcagtgtattacaatttcaaatataatagagtaggtcatgtatttcagggacgttatcacagtgagactgttgagagcgaaagatatttctggtgctgtgtccgctatatccatctcaatccagttcacgcctcacttgcaccctctcctgcacattataagttcagcagtatgaaagaatatctcaaaaaatccagacttcttatccatccgaaagcatttcagctatatatccaaaatttcccgggcgccgccgatttccaacaattccataaccatcgtgaccatttcatctatattgatacgcctgaagaattgtttgccagaaaagaactgcttattgacgaatgcgcaaaaattttcctggcgggaaaaaatctgccttccaaagaagcaatcttctggtctcccgagttaaagaaagagtttataacatatgcgtcagacaacttaaaggtatcgaaagcagaagtcagtcgatatgttaaattttgaaaggggtcagacccctatgcgcataggggtctgacccctttcaaattcctttcaaatttcaagcgcatcaagcggcacgagctggctgtcttttctggcgtatacttcgagtctgtgatagtgtacgggtatttctgccatatcaagtcccatatatgtgccaaacgcttccattacaaggtcaggtttcagattttgttcgcttccggtggcgagcagcagatagatactgtcctcgctcacttttaactcgtagatcattggttttatgtctacttctttttcacttcgcttcgtccttttccatacgacgatctgttcttgatctatgaaagattctgcctgctctgcccacgattcgggcagtttttttgtgacttcagacgtatggaacgtctccggaagtgtcacttgataacctgcggctgccacaatggtcatgccgctgcttttcttatcgtctgctattcttacaaaactgacaacttcgattccttctaccatgactgagttgagctggcttacggcatcgtcaggtgagatattcccggtcagttcaatatcgaaatactctgcatcacttgtgattccaatgccaagcggctgtgcgaacgacatgaccatatgtggactgtagcccgatgtaaacgctatcggaatctctgcccgcctcatagccttttgaaaataacgcatgacatccaggtggccgatgaacttcatgaccccgaacttacgaaacttgattcttgctttcaacacagacacctcctccccacctggccgcgccgcagccggaacatttctgccggcagttcggagtgacctctccgtccatggcacgtttccattcctttatgaggaactctttcgtcacaccgatatcgataaaatcccacggaaatacttcttccagggaacgctccctctgattataaaatgcaatatcaacgccggtattatcaaatgcctgcatccactttgcgttgtcaaaatgttcactccaggagtcatacagacagccgagacggtatgcttcctcaaccacagccgctgtcctgcggtctccccttgcaaatacgccttccagtaccgtgacctccgcatcgtgccagtgataacgaagacttttccggttcagctggtcattaaaggcccgtttcaccgtggccgccctggaaatgtattcttcatttgtatacatttttgcccactgaaacggtgtaaacggcttaggtataaagaaggaagagcttgccgtgatctgacattttccgctgcgctcctctttcgggatctcgtaatatcttctcgccaccttgtccgccagaacggcgatctccttcatatcctcttccgtctcggtaggaagtccaagcataaagtaaagcttcaccttgctccagcctccctcaaaggcctgtcctgcgccgcttatgatatcctcctgcgaaagtcccttgttgatgacatcgcgcatcctctgggacccagcctcgggggcaaaggtaagactgcttttccggatatcctgcaccttgctcataacatccagtgaaaaagcgtcaatgcgaagtgacggcagggaaatattgatccccttccccttaaattcatcgatgagaaatgccaccagttcctgcaggcagctgtagtcactggaactgagcgaactgagggaaatctcctcatgtccggtgcttttcagcattttataagcatattctttgagcacgtttacatcccgctcccttgtaggacggtaaagcataccggcctgacagaaacggcagccgcggatgcagccgcgctgtatctccagcacaactctgtcctgggttgctttgataaatggcacaacaggcgcctctgggtaagggattgccgtcacatccatggcggcctgctttttgatttttgctttagcatgcacattattcggaacaaatgatgcgatcgtcccgtcgtcgttgtaggagacatcgtaaaaagaaggcacatatatgccttttatcccggcggccgcctcgagaaattctttttttgaaccgccgctctgcttgatgtccttataaacatccagcagttcatcatagaccgtctccccttctcccatatagaaaaggtcaaaaaacggtgccagcggttccggattatacgtacagggtccgcctccgatgacgatcggcccttcctctccacgttcctttgcctttaaagccagtccgctcaattccagtatctgcaggatattcgtatagcacatctcgtactggatcgtaattcccagaaaatcaaattccttgatagcgtcctgagattcgagcgcaaagagcggaatctgctcgctgcgcataatatgatccaggtccgtccacggagaatacacccgctcacaccagacatcttctctgcggttgaacatatcatacaatatctgaatgcccagatgggacatgccgatctcgtacacgtccgggaaacacatagcaaagcgtatctccaccttactaacgtccttaattaccgaattcacctcattcccaatgtatcgggccggcttttcgatttttaataatatatcatctcttaaagctaattttctcatgttgttcctctcatgttttctgctgatgcataaatactgcgttgatgtaatcttagatattatatccattttgaggaagaacttcaagtagatattgaagcagtaaccacgactttacttttcaactgagataaacggtggaaaggtatcggcgctgccgcttcgccgcatcgtttttgcatctacatcaaaagatctgccatcatactcatagaacagtttcccatttttcttgtaaaaacgatgttccgattgaaaggcgacaggcttgaaatgcccgtcttgtataggctggtctctatataatacctgatcctcagataatctcagtacctcattttctaaacggacatcatagataccacttacgaccgcttccgccgccacatctttccccgaagctgatacgaaccgaaaacagccggtaatatcattcgtgcttttccgttttgctaattcatagcggaacaaggatacagcgctaaaatcttttcgtaattcctcacgctgcccgtcccctccaataagccatatcttctcgttggaaactataaacatatcaagttggaaactgctttgagaatacttcagattagaaaatgatatttgatcagagtatacaccctgtaacgctccattttccagttcatagactgattccttggtatacagagtcttgccgttcacatttaactcaataaaatcaatgatttctttcactgttatgcctgtcccttcaatttttaactcactttgttcaaagatattttctttttctgtactcgatcccattcctggtcctcgcaccaatataccatgttgtctgaagcatcgaataccatggataccacggttgggcatacggtttgtgcggttgcctttaaaatagcaaagcagtccgaaacattaagatcgtcttttttattctcaagcatttccgcagccttattgtacctgtcccaccccatccacggatgctgctctgtatcacccttaaagggagaaaagttagtcaggaccgcatattcaggttttgaaaaatattgatacccctgtcccggaatgatccgcagaacattcccgtctttatctgaaagctgtgattggaatgtcacgcctggaacgctgtaaacaggctcgcgctcaacgatagctttgatctcatttaacgtctttttaccgagaagaagatcaatatccagcgtaatgatattatgacagtcctcgttcacagggttacttctgtcatcaaatggccagcaggtcggcatggctacaaaatcacctcttgcattagcgccaaataatggcagccacccttccgtttcatcatttatagcaatataaaccttatcatcttcaactacaaccttgtgatccatatctaaaatatcaagattccagccaataatcgttttctttttatttgaaattatacttgtacacatcttatactctccctgtccttccataatttaccaatgtatggaaagcaataatacaccggcccttgctagataatgatctgcaaataaccgatgacttcatttgcatcaatttccaatgtatcatagtaccttcctttataaaaaagggaaaaatgattcttttgttcacttttcacattaacgatacagcagtccggcaatgtaacctctctgcctttcgtataaatgattttaccttcgtgtgaaattccaaaataatccagtgtctctattaatttagaaaaggaacactgccatgcccctgcctgcatgatctcaacaatttcatctacgctgagcccggtaagcatagcgatacaaatttggccgcaatatccgttttttggataagttatatgacggatgccgtcaatttttcgtataggatcctccttcgtataaggactatcatgattgatccgggtcaggccgttaatgacctcaaagcaaacgcctgtctcatgattgctgtcaatcttatttacaacagactttttaacaggaatgtagtagttgcccgctccttttggaataagtctgcactcaaatatatgatcctcaacagacactttaacgggcaccagccctttttggccgcattcttcccagatattaaatggaattttaataaaataccggttcccttgcttcaataaattttctgtaaatgtgtatttcataatactcagttacctttccggcacctgaccgtgctgtaaataaacgaaaatatcccgatcaacattacaataccgtctgccctgatgatccagtctgccagagaaacaaggaaggtatccacccccattatgatcaatgaaacaattaaaataatgatactcgccgactgaatctttttcatccgtttccctccgacttataattttaagctttcaacagctttaattcatctcaaacatgcattcacaaattttaccggtacatccatgcgttctgcaacctgctctggtgtcatgccgctatctgagaagcgtttacagacaacttttatattttccccgacttcgataatatgcctgtctggatcatagatacggaccacacgctgtccccatgaatgttccttaacagggtggacatattcaacgtccaattcttccactttctctgcaaacgcatcaaaattgtcttcttcaaaataaacttccgcattatttgtaccaaacgaaatgtcgctcctgcctgtgaagtctttccatgtttccgctgtctgcagagacagaccgccggttaaagttttattcgccccaaaatccatgatcacgtgaagtccgagcacttttttgtaaaactgaaccgacttatccatatcggtcacaactaataaagaatttttaaatttcatgatccggccccccatattgccgcaaggtctgcgcgttcataacggttatgtccctgcatctgctttttatagttccagcactttatcgcttcttctaaagatctgccctgattatccgcaaagaaatcacggatataggtgttgtattcaaattgcttctctattttcgtttttccttttttcttatcttcgagaatttgttcataagctgcgactgcttctttataagttttgccggcattattttttaaccatttttgaaaggcaacattaaatgtaaagcggtttccgatctgctccttaaaaaacgccctgtgcctttcagaacagacaaagtccggttcgatctctgtatcttcctgaatgtcagtgatttccgccgcccttttccgtgaggaagagggagactggattttgccggtatcaaggaaataagcgatcctgtctgttatttcaatcttccctccggacgcaggcagaccgttttttctgcaaaagtccaccaattcctcttttaagtaataaaaatcccgaaatgtcttgctgtctaactctcggtctaaggctggtctttcattcatacctttcccctctccatgtgccgttctgctttaactgttccacgtcgccgcatcctgcggcatggcggcttcataataaccaagtttatgaaaattgtaccattctgtgattttttcttcgggcgcggcctttaaagcgagcagaacttctttggcaaattcaagcggcgcggtgccgtttgctgtgattacattcttatcacggaccgcctgccgcgtcacgtaccgttcctctcctgtatacattccgcctgcccactgctttagatcatccagatcgttgctcgtatgcttgacattgttcagcgccccggtcgtcccaagaaatgcggaagcatcgcagattcctcccaggactttcccttctgccagacagctgtctaccagaggcctgatctttccggcgttttcatttctccaggccatacctccgatcaatataagggcctcgtagtcggacggcacagactcgatactgtgatcaggcaccacatgaaaccctccgatcgatgtaaccatatctgttgacagagataccgttttaacatcgtattctcccattccgagcatatagaccgcggaggagagataagctgcctcccagtccgcaaactgttctaatataacaaataaaatctgttttttcatgttattcctttcttttttcaaatgcatcttttcaattgatctcaaaagtttctgaatgaaaatttgcataatagcgcccgctgactgctgtaaacttcagaacacaatagtccggatccgttacaccttcgggataatacatcgtgtcaccttcctgccagatcatttctttgctgtcagagtcctccaatacttccatatgtccgaccagcataacacctctgaagaagcgcctgtcgcagaagtaaatgctggcatttggattatttctatattgagccacccgcatggaagacgtgtttgttgtaaaataaaattcccggatgcctgtccgtttacggggcgggagcatcgctttcatgttgggaaagccatcctctgaaacagaggcaataaatgagactccctgtttatcaattaaatttccgattgttttttcagcgtcacgcagcatgttcttattctcctctcaattgttatatgaatcaattctaccatattttacttattttttcttgtattatatggcacaaaaaatacttatgagacatctcataagtattccggtttttagttccagctggatctctcgcaagcctcgatttcagataatatcaacgattggatatacggattattttgcggacagaccaaaaacataaaagcgccgttacggcatttttgatagcgctcacctttcagcctgaagtcataccccatagaacatctgggattgcaggaatccgggacggccagacgcttacatatcggagcatcctgaactgcatgaatcatttcatccggcagcgtttccaacagcttttcatattgaccggcatgagccccatagatccgcacaagcattcccttttttcggaacacataatttgagacggtcttcttattgtaaatgtaagaaaccatgtagccacttttggctgacttgatctctgtcctgcagccgagttctgtcagtctgttatgtaattccttgacaaaatcctggctttcaacaggtacagaagtaatgaaatcattgaattcaattttcttgtccatagtcataaattcctccgttattctctaaattatattcactattccctgttattctggcaaatgtaataccgcgtctttcatacttgatcataacttatctgccagagtgtttcctctcttttgacgcaccgttttgagagcttatgtgatttattttaacatctgccttcaatcttttcatcaggggaatatttccagcgtcacgatctttctattgcccttcttcaatgcacgatgcccgaaggcagccggctgtcagtgtttttgcgtttctggccatgtccgcaggcgtgccggtaaatacaacttccccgccgtttttgcctccgtcaggaccgatgtctatgatccagtccgcctgcttcatcacatccaggttatgttcgatcactatcagcgtatttccccgggaaacgatcatatcaaacagctgcagcagatttttaatgtcggacatatgcagaccggtcgtaggctcatcgagcacaatgatactgccccttttccccaggttctttgccagcttgatcctctgccgctctcctccggaaagggtactgagcggctggcctagagtcaggtaagataatcctacctgctccatcactttcaggcactttctgatcttggcatcctcaaagagttccattgcctgtgaagcagtcaggttcagcagttcgacgatgttccttcccttgtatgtacaggcaagcgcctcctcactgtaccgtgcgccgccgcaggtctcacattccgtgacgatcgggtccatgaaagcaagttctgtcacgatgacgcctttgccgccgcagaccgggcaggcgccggcagagttgaaactgaacaggccttccggcctgccgctgttttgcgacataagttttcttatctcatcaaagaaaccgagataagaggccggagtggagcggttcgttgctgtgatgggaccctggtctaccataacggtatcactttcgtactgtccggcaaatacgccggaaatgagggtgctttttcccgaacctgcgacgccggtcacaacagtcatgatccccagcggtatgtccacatctatatgtttcagattgtgcagactggcatcccgcacgggcagactgcccaacggctgccggaaggactcttttatcggaagggactgccgcatggcctttcccgtcagtgtatcggagcaaagcagttccgcataacttcctgcaaaaacaatttctcccccgttttgccctgccagcgggcccacttcgatcacatggtccgcgatcgagatcacatccctgtcatgctctacaacaagaatggtatttcccttgtcccgcagcctctcaagcagacggttcatgcggtggacatcgcggggatgcattccggtgcttggctcgtcaaagatatacgtcattccggtcagactgcttcccatataccggaccagcttcagccgctgcgcctcccctccggacagagacggggtctcccggttcagatgaagatacggcaggccaatctcaatcattctgtccagtccttcaatgatcgtctggacgagcactgtcactgtccggtctgtgatctgccgcaggactttccgaagcagagtcagctccatatcacacatgtccgcaatagaatatcctcctattttacagttcagggccgcctcattcagccgtttcccgcggcagtcggtgcattctgattccacgagcaggttctgggatttttctttcgtatgcctactttttttactgatatcccggttcagaagcgtttttgtgtacttgtggaacagcccggccactttcgggttctccggctctcccctgccgtcccgggatccgtacagaagaaggttatattcctcctttgaatactccctgaccggcttgtccaggtcaaacagtcccgatgcggcgtactgtttccaataccaggaaccgggacggtacagagtgtcccttacgcagccttcattccatgatttatctggctctaacagagcgtttatatcaacttgcgtgatcttcccgagaccggaacatgtcttacacatcccattgggatcgttgaaggagaagcaggaggccgtgccggcacagggctgtccgatcctggaaaacagcagccgcaggctggcatacagtccgcttatggtgcctaccgtagagcgggcatttcccccgagcggtgactggtccactacaacggccgctgtcagattgtcaatgcgctccacggccggtttgggatatttaggaagccgcgcccttacgaacgccggatacgtggcgttcatctgccgttgtgactccgcggcgatcgtgtcgaatacaatgctcgatttaccggagccggacacgccggtaaatactgtgatcttctcctttggaattctgaatgtgatatgttttaaattattttgcgtaagtccgtgtacaatgatatcttccatttatttatactcctcctgcctgttttaagctgtctctctgatctgtgacagcgctgtccctttattttacaaaatccctgcgtcatatacatgatatattttgcggtcctgtgtatccactttttggtaaaggtacaatatccctgcataagatgtgattttcataaggtaaacatattgcctgtggagatataaaaggcactgtgatacaatataagcagcaaaaggaggtgtctgcttgaaacaatattcccctttagaaagggcattggaatatatcgaagaacacttaaacgataacatcggactgaatgaggtatctaaggagacaggttactcctactactatatgacgaggctgtttacctctgttttaggcgaatctgtcggccgttatatcaaccgtagaaagctatacaatgcgtccaggaagctcatagataccgacgagagggtccttgatattgcggttgactgtggttttgcatcgtcggaagcattcagcagagcctttaagagcgaatttggaagtaatccggcagaatatcgaaaagcaggggctgatctggtggtgaacgccaaaagagaacttgtgccggaagatgtatatcatattgcgcataatatttcccgttcccctgagatcatcatgacagatgagacaaaggtcgccggagtccggggaacgacttctctgtcggataaccgtatccctgaaatatggaagcagtttctgctttttccaaaagagcttttcgatggagcggacgtaggatatggcatctgtgaaacaaaaagggccgtttatacaagagacggcgacgtattgtttacagtcatggccgccggagcggtggacacttttgagagtctgccgcggacactggacagaaaaattctgagcgcggggaaatatgccgtttttacccatcggggaacttttgcaaacttgcataggacatatcggtatatttttggaacgtggcttaagacagccggtgaggaattagacgatcgggaggactttgaaatgtatcaacggaaaatcgtatcgtatgatgatccggataacgaggttaaaatatttattccaattaagtgaagaaaacatcaaataatgaaaagcaaataaagcaggacagcctccaaagggttatcctgctttatcgtgcctttccgcttctaatttggaagacgtgttatagttctcaaatcatttattaagcatttcgctgcctaaccgtacaagcgtcatggaacggttcatatatcctaaagcagggaagttcgtataaatactcactcccacttcatctcccgcggacaaaggagcttgaatgacaaacgtcgaactgtctctgttagatatattgaaaaaagtagaaatatcgccaaaaaccggtgctccgttgaccgtgatcaccgcggtcaaatagggctgttccggatcaggctctgtcgtcgtttcagcattgatggagacagttatctgataaactccactttccagaaccactaattcatttccagacgcactgacggaaatcgtatcggataacggtccggccgtattgaacggcaccgatgtcaatgacgtccctggcgtctctgcccggccccctcttaaggatccaaatgcccaaacagcttgttccccaggaacatccggttgatcgcatggtttacatccacagggagcgttacatttattacaattatgatttattatatccattttagtctccttttcggcactgcgtaaatacagagtcatgctccctaatatagtatgtaaagtctgcttctatggtgttctttaaaacagccaatgttttatctgttcttttttatacatgcattcagcgtatccagcatctgttctacctgaagcggtttggacagatgtccgtccatcccgcttgcaatagatttccttgtgtcttcgtcaaatgcattggcagtgagcgcaatgacgggaactgtacgggcatccggccttcctgaggttcggatgcgcctggcggcttccaggccgtccatgaccggcatgcggatatccatgagaatggcatcaaatgtgcctgtttcactccggcagaagcactccagcgcttcacggccgttaggggcgcatgtcacgtcaaaaccatgcatttccaggatggactgcgcgatctctctgttcagttcgttgtcttctgccagcagaatacgccggccggtgaagtctgccggatgcgcgtccatttccggctgtgtatctgtttcttcctcttcttcctccgcgtatccaagatgcagtgtaaagaagaattccgaaccctctcccactttgctgtccgcttccagtgttccacccatcatctgtacgaggcggcttgagatcgcaagtccaaggccggtccccccgtttcgggccgctgtcgcggggtctgcctgttcaaaagcattgaacacacgtgacaacgcctccggctcgataccgatacctgtatcggcaacagaaaaccgcagcactgccatgggggatgcctccagttcttccacccgaaccgtgatgcgtccctgtccggtaaatttcagagcatttccgatgatattgaccagcacctgatttaaccggagactgtcagcgttgaggcgtctgcctccgctgtattcattgacaaaaatcagttccagatgcttttcctccgcctgggctttgaataaatattccagtttctgcatcagctgcactagatccacaggctcataattaagttccatctttccgctctcaatgcgggacatgtccagtatgtcattgataaggcttaatagataggcattggcggattcgatcttattcaggcagtccatagttttttccctgtcgtccaggacacttttggctatcgttgtcatgccgctgatggcattcatcggagtgcgtatctcatggctcatccgtgaaagaaagtctgtcttcgcacggctcaccgcatctgcttttgatttcatgataaaggaaggaacgatcttgaccagctcttttaaaagtttccgctgctcctgcgtccactcgtaatcttctacatctatctcaaagctcatagaaccgacgtattccccgtaattccagatccctccgtggaggcaggacgcaatatgggaaattccttctctgacattatgatctgccaggccatcctcgtcatacatattggcacagatatcaaaatcctcttcagaggcataaaagtcttgtccaagctgcagatcattccggtttctggcccactgataggaaaaccggtagctaagatacgcccggtccgcctcgatgatagatacccggtcaaactgaaatgtccttccgatccgtgacaggagcagaaacactgcgtcgtccagattcttggattttcccagcagatcaagggcaaaagacacaaggtcatcgtccggccgggaagtctcccggttaatgtcattgaccggatgactgtctgtatagagctgcgtcaaaaaaacgccaagttcattggaagtatccagatagcaggcggcctgtcctttcccgttttccttcacgtattttaacgtactctcggcgcagcggtacagggcgttatattcatccaccacctccgtgctgcacatgccgacactgacggatatttgaatcttcttgtccgtacttacaaggatactgcgcacctgatcggcaatacggggcccgatgactgtagcctccgctttgcagctgtttttaaagaacaccatgaattcatcgccgccgaggcggatctgaatattgtccggtccgctctccgaccgcagaagatccgccacctcctgaagaagcgcattggcaaaaatactgccctccgtcctgttgatctgcttgaaatcatccatgtcaaacagcatcataacgccatgttcgcccggtttcttcgtccttagatattccttcacaagccggatgccgctttctttgttataaagtcctgtcagtttgtcccgggagcgcgcttcatccagggcgcattccatctctttctgcttcgtaatattctctacaataccgatcacaagtttgggccgtccattttcgccggtctgtatgacagacattgtctctctgcaccaggagcctccctccagtatcttaaactcacaggaagccgtgtgcgcgccgtcctggatccgcctgtacatctcgtagaagtctgccctcgtctcttcgtccacatgctcctttgcaaaactgcgcggcatatcatcgtaccgctcccggcagtgatagatttggcacgtacgtttcggcacgatacattcttttgtctccgggtaataatagatttcacaagtagtcgtatgctccagcgccagatgcaggatctcattgctcgcctccagctgttcggacagccgtctgctgcgctgctcggcattttttctttcgttgacatccaggtacacgctctggatgacctcttcaccgtccacatccacgatcagttccgcgcttccgatgatccagcagggcgtgccgcccttttggagcagacggtattcaaagctgatcttatctcccggcctgcgaagctccctgagaagccccagaatgtacgcacggtcttcctccgctatcaggacatccgccgcccattccccgacagaccagaactcttcctgagaatacccaaatatgcgtactgcctccctgttggcctttttaaaaacagccttctcgttcgtcagccggtactgtacaataccacacatgacagactgaaacagattgttgtaatcgtccatctgttttatctggccgccgtcctctttgcctggctgcatctaatcgcccctctttcctgtgagaccgcgcggccggctgccggccgcggtcacatatatgttcctaaagcatatcatatcctgcggtcaaactcaatgacctgcaccggatgtccggctgaatacatccctgtccagcgctttgttctggtgtgccacgatcgtcgtgcagacagcatcccccgtaatattgactgcggtccttgtcatatccagtattctgtcaatgcccatgatcagtccgatagcctccaccggaagacctacggaattaaacaccatggtcaacgtgacaagcccgacacttggaacgcccgctgttccgatagaggccagtgtggccgtcccgattacggtaatataatctacgatatcaagctgtatcccaaacgcctgggcggcaaatacaaccgcgactccctgcatgatagccgttccgtccatgttgatcgtagccccgagcggtatggtgaacgacgagatccttttggatacgcccatctttttcgcaagtgtgtcaatagacagaggtatcgttgcatttgaggtggctgtagagaatgcaaatgccatgaccgggaaaaagtttttgatgaatttcagcggattcagtcccgtgaacagctttaaaagccccagataaacgacaaagcactggacagccagggcgatcagtacgccgagcatgtatttcccaagcgggacgaaagcggagaacccaattccggcaaaggtcttggcgatcagacagaacacaccgaccggcgccagattcatgaccatcattgtcatttccatcataatatcattgaactgactgaagaaattgcttaccgtctcagtccgctctccgagctttgcaagtatgacgccgacaataagggcaaatacgatgatctggagcatactgccgttcgcgagagaattgatcgggttgtccggaatgatattgagcagcgtatcggtcagagacactgcttccgtgcttcccacatctgcggcgcccgactgtattttggacatgtccagtccccgtcccggattgataatatttcctacggacaaggccacagttatggcaagcgctgtcgtacagagatagaagacgagtgtgcgcacgcccacagtgccgagctttttcgtatcgcctatggacatactgccgcatacgagggaacagaacacgagaggtacgacgagcatcttcatcaggcggataaatccttgtccgatgacgtgcagaacgccgtttacgataatatcatctctcacagagccggcaggcactgcgtagcatagaataatgccgcagacagcccctgcgagcaatgctataaagatctttgtcgtaagtcctaattttttctttgcctcttttttgttgtttcccatctatccgattcctcctttgttcttccattcctccatatattcctccagggatgccctccagtcaggcatctcgtacacatcgatgatcctcagtatgaagttgtccagcaccgcataggcaggccgcaccgatgccagttcagactctcttgccggcacaggcttcagttcgatgcttctgcctgccagcttcaggatctcctctgcaaactcgtaccggctgcacgtgcctttgcatgtggcgtgatacgttccatattcgtttgtcccgatcagataaaggataagccgtccaagatcccgtgcgcttgtaggggaaccgaactggtccgccgcgacagaaagctgtttctggctcccggctttttccagcacactgtttacaaaattgtctccttttccgtagacccagttgctgcgcacgataaaatgcttgtgggtaaattccttcacataattttctcctgctctcttggaacgcccgtacacagtccgcggattcgtgtcatcaaactcagaatacggcgtagtgctcagaccgtcaaatacatcatcagtggatagctggacgatcttggctcctgtctttctggcgacaatactcaagttccttgctccaagcgcattcactctgtacgcaagctccggctgttcctcacagagcgctgtgtctgtgactgccgcacagtttatgatcacatccggccggttgatctcaccgaaactgatcacctcgtcggtatgggtaatatcaagttcttctttatctgtgttgaacacttcggcgtcaagcggatccagtacatcattaatggcagttccgagctgtccccccgcgcctacgatccatacttttaacataatctctcctcctgtatcttataattcatgcatccgtaatttaagtgcagtgtcatagtttcacaccataataaaagcgttgattacttttaatcaacgctttatatcctgctcatttattatatcaatgttccgggactgtgtcaacaattctgcccgcacggcacattccatcatttacctcaaagattcttccagacttccgccacatccatgtcggtggtgatctcctgtatcacccggtcgctgcttacatgtttgacttcgatgccgttgttctccatggcaacaaaagctgcaaaaagcataaagcacaggaagacccggatcccaaacgtactgaccgctccggtttcctcttctccgtatagtttatggtaagcggcgccgtatctcggatgtacggccggagggaccttacggtcactgtacagatagcgtgtttcatccagcagctggcgccttcgtttttcagagctgttcatagtgcgtacccgtcctttccaggcagatatgtgtgagccttttcctgcctggaatattatatgcggtatgcgtttactttcattccggtttttaccggtccgcaagctcctttacgatatcttcccagctgattcccctctctaccataagcaccatggcgtgataaaggaaatcggccatctcatatttaacctcttccggattcgggttcttggcggcaatgacgatctccgtcgcctcctctcccactttctttaatatcttatcgatccccttatcaaacagataattcgtgtaggagccttcctttggattttcacgtctgtccataatggttccgtacactgtctcaaacacttgcagcggatttgtctcgtcatagtcactgccgacaagaggctggaaaaagcaggtcggattgcctgtatggcaggccgaccctacctggtcgactttcgccagcagcgtatcatagtcacagtctatcgtcagagattttacatactggaaatggccgcttgtctcgccttttgtccagagttgttctctgcttctgctgtaataagtcatcttgccggtcttgatcgtgctgtaaaatgcctcctcattcatataggcaagcataagcacttcctgtgtcttgtaatgctgtaccacgaccggaataagtccctgttcattcgtcttgaactgtgaaaattccatcatgctctcgaaagaagtcatcttgatttcttcctgaccgcatttttccttaaactccacaaagtccatatctgtctggctgacaaacttccctgacagtcccttgacgccgggacatttcagtattttaaacagttcaggctcctccattgtatcggtcacgatcacacatggaacatccgtgacgttcatgacagaattaagatccagcctgtgcatgaatacgatctcactgctgtagtcctgaataaggtgctggtgcttgaacagagcgtcaaagtcgttcagtgatactgccatcttttccttgccgaaacgtctggcggcatcctcgatcagctttacgctgtctgctttggagaagttcagcatcgcccgcttggctcctgcgtacaggatcttctttatatcttcctggcgccgtatatttcccccggccaccatcggtatgcgtatgacacggttcatgcgcttcatcaggtcgatcgcttcttcatgttcctcatcagagtctgacaagtcgaacacgagcagttcatccgccccgtggtcactgtaatatttggcaagcccgatgacatcttccgatatcaccgtctcgtccgtaaaccattttaccgcttttgcgcccctgataaatatgcagggtatcaatcgtttatagctcatcgtatatagtctcctttataggcttccttttgtagtccatgcttcttttatccgcggttcctccatggtcgccatatcaagcgctttcccgaagcttttgaacatggcttccgccatatggtggctgttgcctccattcagtatcttcaggtgaagattcatcatggcgctgtaggatacggcgtaaaagaactcacgtatcatctccgtatccatctctccgatccgttctgtcggaaatgaagcgtcacagcttaagtatgggcgtcctgacagatctgccgcacagaggacgagcgtctcatccatcgggaggataaagtggccgtatctcttgataccggctttatcgcccactgcctgggcgataacctgcccgagtacgatccctgtatcctcgaccgtgtgatgacagtccacgcgcaagtcccccttgaccttcaccgtcaggtcaaataagccgtgccgtgcaaacccgtccagcatgtggtcaaagaaccctatcccggtgctgatatcattctggccggtcccatccagcgtaagtttaacagtgatatcggtctctttcgtctttctcgtacattcggctgtccgtttcatcgtcttctcctccttatctctcttcaaaacgcactctgacggaattggcatgtgcagtcagctgctccgcctccgcaaaggcttcgatatccgtatgtatctcttccagcgcctctctggaatagccgatgatactggatttctttataaaatcatccacggacagcggggagaagaacttggcggtcccattggtcggcagtacatggttagggcctgcaaaatagtcgcccagcggctcgcttgagtattccccgataaatatggctcctgcatttcttatcttcatcataacattatatgggtctcttgtcattatctcaagatgttcggaggcaatgtcgttggcgatatctatcacgtcatccattgtgtcggccacaagaatatagccgtaattatccagcgatttctttatgatctctgaacgggacagctgctctgcaaatgcatctgcctgagcggacacctcgccggccagcttctcacttgtcgtcacaagtatggcggacgcaagttcatcgtgttctgcctgcgacagaaggtcggcagccacatatcttggatctgcggtctcatcggccaccacgagtatctcactcggacctgctatggcatcaatgctcacatggccgtacactgcctttttggcgagcgctacgtatatatttccaggacctacgatcttgtccacctttggtatgctctccgtcccataagccagcgcgccgactgcctgagcgccgcctgccttgtagacggcgtcagcgcctgcttccctggcggcgacaagcgtattgggactgacccgtccgtcttttccgggaggcgtcaccatgatgatctccccgacccctgccactttcgccggaacgatgttcatgagcacagaagaaggatacacggccttgccgcccggaacatacacgccgacccggtaaaggggcgtgactttctgtccgaggatcgtaccgtccggcttgctgtcaaaccagctgtactgacgctgcttttcatggtaagtgcggatattcaccagcgcttttctcataatggcaagaagagaatcgtccacctgctcataggcctcctgaaattcttcttccgttacttttatattcccggcgttgatatgagctccgtcaaactttctcgtatattcaaaaagcgcgctgtctttttcctcttttatccttttaagaatctctgatacgccctgttcataaccggcgtagttgttcgggctccgtttcagaaggtcctccagtacattctgttttgtctctttgtctaaccgcagtactttcatatttatccgtcctctcttcatcttccggctggtcttatatctgaatctgagcgcgcagcttagtgagaagcgccttgatcctcccgctctccatgcgcatgcttaccggatttactatcattctggctgaaagcgggcatacttcttccagcacctccaggccgttttctttcaatgtggagcctgtctcgacaatgtccacgatcacctctgacagcccgactatgggcgcaagttctattgaaccgttcagcttgatgatctccacggtctgatgctttgtattataaaaatagtcttttgcaatattcgggtattttgtggcaacccggatgagttcgtgatgctggagcagaggggccgcttccttatgaccgcagacgcacatgctgcattttccgtacccaagatccagcacctcatgaaccttgcgccgttcttccagtatggtgtctttgcctgccacgccgatatccgcggcgccgtattctacataggtaggcacatccggcccctttgccagaaagaatttcagcttcagctcctcatttgtaaatatcagttttctggaatctttatctttcatctcttcacatgtgatccctattttttcaaacagttccagtgtctgatttgcaaggcgcccctttccaagggcaaatgtcagatatctcatattgtcagctcctgtccctggaggcgatcactttatgctcccctgtcaccaggtttatcatcgtgatctccccatttttattgatatagatcagatttccggcataatactccttgccgtattcgatgtaatcttcaataagtttacctttggattttttgacgagctccgtgttcttggccttcttacggaaatccctcgacagtatgagcgcctctttcagccgctcttcatcatacacgataagcgtgttttttctcgtgtacacaatacgtaccttctgtcttgtgagcgcgttcataagctcgtcgatgacgatgacaaatccgatagatgcagactctttaccgaatttttcaagaagccggtcgtaacgtccgccttttacaaacgcgtccccggtcccgaatgtgtatccccggaaaatgattcccgtgtagtacccataagtaccactcatgctcaaatcaaaggttacgtattcttcgacgccgtatatcttcagcacatcgtatattcgttccagccgtttcactgccatgataccttttgagttcggcgcggtgtttctcgcctgggcaaggatctccacaccgcccacaagctcatccagggcggaaaaggcttctttggagcttctttttacatggatgctgtccagaaattgttctacgccgaaataattccggttgttgatcagttcccgcaccctctcttctgcttcctcgtccaggtccgcatcctcgatcagactctggaaatagtcgacattcccgacattcagctgaaattccttcagcccgatggacgtcagacattcaatgacaagcgccagcatctctgcgtctgcctccaccgagtcatctcccatcagttccgctcccatctgtgtgttctccctcagacgtccctgatagctggaatgatttacaaacgtattgccggtatagcacaggcggatcggcagctgttcttctccaaaaagcgttgctgccgcccttgcaacggacggcgtgatatccggccggagaacaagagtgttgccgtccttgtcaaaaaacttgtacagatcctttgaaggaatggtgcctatctccttccggaacacgtcaaagtattcaaatgtaggtgtctgaatatcgtgatacccgtaaagatggaatactttgccaagccggctctccagtgccagttttttcccgcattctacattatatatatcccggactccttccggagtgtgcaataattttttcataattcctcccaacgatgtcatgctgtctcactcagcgccgctttagtatgctactttgttaaatcacattgcattatacgcattttcttattccttgtcaagtttctccctcagctccagatccagattcatggcatccagatacgggacgaaacagccattttttaattcaagcaggaagcgtggatccagttcgtcaaaccggaagctttttcttcctccgcttttcgcccgctcccagaatccctgcatctcaccaaagcgcatgtaatacaatatatttctggccgaaaaatagatgatgagaaaggccattcccccctgcttctcatagctgcccatgaacgccacctggtgctcatggatattctgaagcggaaaggtgtcggccacacactctttcgcgtcaaagcagacaggaattccctgtaccacgccgatatagtccaccgtactgcgctggtcaaaataagccagtgtgatctgccggtgttccttatccatttttaccggagtgatcggcgtcgggatcttctgtataagtgccagatctttctccagataccgttcatttgtacggtttatcaaatcttccagtgtagaacctctaaggcctcttgagttccatgttcccatgctgtctcctttatcactttttgaaataaggccggcaccggcgcccggaaggtcctttctgaaagtgccgcaaactcgccttccagcacaggaaggacaagctcatatgagtggagcatctgtgatgtgacgccgtatttctttctataccgctcattcacatccctgtctccgtatttatggtcaccgcacagcgggtgggatacgtaagccagatgtgcccgtatctgatgggtacgtccggtgatcagatgtaccctgagaagcgaatgctccctgctgtacgccagaggaatatactccgtctctatgggcgccgccttttcagcctccccggacgttacgatcctcacttcattcgtctgttcatttttgataagatatcccttgatatgggacggcttgtctactttgccttttacgatacagagatagtattttcgcaggtttctgtcccggaaaaggctgccgaacatctgaagcccggccagtgttttccccgccgccacaaggccgctcgtattgcggtccagcctgttgcagacggacgggcggaaggtccggagctcctcccgcgtaagctgtccgctgtccagcagatacgagatgatatgctcaacgagagagaggtctgttttttcagctttctgtgacagcatgcccgccggcttgttcacaaataggacctgactgtcttcgtagataatatcaagcgtggtatttctgccttttgcgcctgcaaccggctcgtcatccccggtaaatttttcaatggtctcatccgacagaaaaagtctgacttcatctcctgtgtgcagtttctcgtttccgccggcccggcggccgttcaatgttatattttttttgcggagcatcttgtacaggaaacttcccggcgcacggttcatatatttttttaaaaatttgtcaagtctctgctccgattcatttggtttgattattatgattttcatagtagttctattaaagaacacctttctttatctctgatttacatggaagtgctcaatattgtgccgcggattttctgttccagcttttgcgtgtcgggcctgtctatcgcggccatattgttcatcccctccgccctggctataaacgcagcatagtcgctgaatatcttcaccgtcaccttgtcgaggcggttctgatgcagtgtttctttcaaatgctgtgccaccttcgccacatccgtcttcgggttggacgcatagccgcacaccgtattgcctgatatgacgactgcgtctacgggcatgatcttctccttgcttgtgatgaccatatcataggctgtcgtaagaagcgccgctttttcttctgtctccatgtacttctccgggtcaacggccttgtacggagcaatggcgataaactctacaagcatctttgaggccggaagacagccaagtacagcgactgccgtgagcagattcagttttgttcccgtctggaaatacccgagcagcagaagcgccactacgatggcaaactccatgatcgtgaacaggagcagtttttgtttttgtgcctttatatagcccggctgtcctttttgtatcttcattgtaatctttcgtctcccttattctgcttttttacttcctgccttcatcaacaggatcaccagcctggacgggagcagcttggcagctgcccttgctgctttcatggcagctccgtacacggatacctcccgtcttgcggcggaatctgcgagtgccttatgcacgacgtcctttggaccggacataaatttttgcttaaaatcactgccggatgctcctgcgcgctcgaaaaaggctgtatctacagggccgggacagaccactgtcgtcacgatgcccttgcgcttcagttcgctgcctgttcccctggcaaaactgtatacataagacttggtcgccgcatagacggcaaagtccggctgcggagcgaacgctgcggcagatgcgatctgtaagatacggctgcccgcggacatgtacggtatacacataagcgtcatcttcgtcagagccctgcagtttaagtcgatcatgcccgcctgtgacttcatatccagtttcgccgcttcaccgatcagaccgtaccctgccgcgttgacaagcatgcggatatcggcggacttccgctccagttccctgccgatccgctcgtatatataatctctcgtcagatctccgtcaaagatacgcacaggaagcggaagctctttttccagttctttcagcttgtcggtacttctcgcagccacccatatttcatccagctgcctgtaaagcttaggtatctgcctggcaaactcccggccaatacctgaagatgcgcctgtaataattgctattctcatacttctgcctcctatctcgttttcttttttttgtgaacgtttcgtatcgtctttttctttctggcagttctgttctcctgtctgtttggtccgtttccggacttaggcgctttatcactccccggatgcctcggacggatgagacagtgtctgtcaaacccgaccagatccatgcggccggcctttttcagcgcctcgagcaccagttcgtgatttttcgggttccggtactggatcagcgcccgctgcatcgccttctcgtgcggatttttcggtacatataccggcttcatatccctcggatcaacaccggtataatacatacacgtagagatcgtggacggcgtcggataaaagtcctgcacctgctccggcatatatcccagatctcttaagtattctgccagttccaccgcctccttcatcgtagagccgggatgtgaagacatgagatacgggacgagatactgctcttttcctatatcattatttatctttttgtatttactgataaaggattgatacacacggttctccggttttcccatcttcgacaggaccgcgtctgacacatgctcgggcgccactttgagctgaccgctgacgtggtactggcacagctcccggaaaaaagtatcgtctttatctgccatcacataatcgaaacggatgccggaacggatgaatacctttttcactttcggcagttccctcagttttctgagcagcacgatgtaatctttgtgatccactttcagattcccgcacggctttgggaagaggcactgccgctttgtgcacaccccggatctcagctgtttgtcgcaggaaggatgtcggaaattcgccgtcggaccgcctacatcatgtatatatcctttaaaatcttcttcccatataaactggtttgcctcggccagcagcgactcatggctgcgcacctgcatgatccttccctgatgaaatgtcagcgcgcagaagctgcatcctccgaaacagccccggttgcttacaagactgaacttcacctcagaaatggcaggcaccccgttgtctttttcataggacggatgataagtcctcatatacggatagctgtacacacggtccatttccgactgggtaagcggtctcgacggtggattctgcacgacatattgatgttctccgtaaggctctacgagtctcttccctgcaaacgggtctgtattgcagtactgcgtgtaaaagctttttgcataattaagcctgtctcttttcagctcatcaaaggatggcagcacgaccgcgtcgtatacgctctctaaatcctttaccttgcataccgttccggggatgtaggtgatatcctttacttcaattccggcatcgagtgcctctgctatctctacgacagacagttcgcccatcccgtaggaaataagatctgcgccggagtcaagcaggatggagcgttttaatttatcggaccagtaatcataatgggccagtcttctcagactcgcttcgatccctccgatgatgaccggcgtctttttgtacacctgacggatgagattacagtatacgacagcggcgtagtccgggcgctttcccatcacgcctcccggggtgaacgcatctgtcttccgcttctttttggagacggtgtaatggttcaccatagaatccatgttgccggcagacacgaaaaagccgagcctgggttccccgaactctgtgatgctcgtcttgtccttccagtccggctgcggtatgatggccactttatatccgtatgcttccagcgttctcgtaatgatcgcatggccaaaagacgggtggtccacataggcatcaccggacacatagacaaaatccggacgttcccatccccgctcttccatatctcgtctgcagatcggtaagaatccttttatcatgtcaatacctcgtaagttccttttcttatatcataataagtctgtatgtaataatcggccagttctttcttcctggactcctgcggcctggaaaattcgtcgtccaccccgcacactttcattccggctctcttgcccgccagtattcccatcgggacatcctcaaagacgagacatcgctctggcggtaccttcagttcttccgccacgagcagatacacgtccggcgacggctttcctctttccacttcacatgcactgtgcaccgagtcgaacagaccgcgcacatccagcgcgttcaacgccgcgtccgccagcgtgcctgcattgcttgtggcaatacctatttttctgccctcagcgcgcatgtccagaataaactcatgcgccccctctttcagctccacagaatgggtatatctgtcatatgtcatatccatccactcatccataacttcctgaagcgtccggtcaagcccgggaaagagatcgagaaaaagctgggccacttcaacataacttttcccttccatcatttcatgaaaatcatccggcttatccagatgatacttgcagagataatcgtcgtcaacggacggccatatccacatggaatctatgagcgtcccgtccatatcaaatataatcgcttccgtgtccttcagcatgtctgtctgttccatatatattccttaactcctcatctgtaagtttgcggtattctcccggcttcagtgaactgtcgaggacgagtccgcccatccgctcccgcttcaggtagatgacttccttccctctcgccagaaacatacgctttacctggtggaatttcccctcctgtatggtaagccgtaccgccgattcctgtccactggatataatttccagcaccgcgggtcttgtccattccggcaaagcagaagttcctatatcaatgccttctgtgaaagcccgcgcatcttcttttgtgacgatgccctttaccctggcataatatgtcttgtccacatgcttcttcggcgacagaaggctgtgagccagtttaccgtcgttcgttatcagaagcaggccttctgtatctttgtcgagtctgcctgcagggaacagatcctttctttcttttgtctttatgaggtcaactacggtcttctccctgcggtcttctgtcgcagatatgactccggccggtttgttcagcatgtagtacacaaaagcttcataccgcaccgggctgtctccgtacaatacagtgctctctttttcgtttactttatattccggagatttgaccactgccgcgtccaccttcacttttccctggcggatgtgcttttttacttcctgacgtgtgccgatgcccatatccgccaggtatttatcgagccttatcatcagcacagcctccatcccggaagatatttattcttaagcgtcccccgcgagagcttgccccatccgagcggataaccgtccacacagacgagataccagcccttgcttctgtcagacaccatgtcgtccagatcgagcgtttcccctttcagatatctggacacccgttcatccccggcagaaaagtcaagtgtctctttgtaatcatcttttttcaaatacatggccagcgcctggctcggctcaaaccgtttctttttcagttctccgagcagaaggcctgtccgcagaaaacgaacgcctcttaagtcggggaggccttccggcatataatatatacgttctccccttatatcaattctgctctcctccagtttccacgatacattttccataaactctgcaagctcagacggcaggacagtaccgtttcgttttcccggaaccgcgctcttttctgcagctgcgcttccgttcttttttaaaagcgccagatagtgcccttcccctttcatatgatgaggaaagatacgtacggtcctaactagttccgggcagtgtgtctctgacagctccggacgtcccgggctgaacccctcatacggctccatatccgttatctcaaattccggccggttctttaagagatgctccactgtctgttcattctcccgcccgtcaaacgtacaggtcgaatacatcatcataccgccgggcctgagcatatctgcagcctggacgataatactcttctggatgctgctgaagaattccggtccgtgttcttcccatgcccgcaccattttcctgtccttgcggaacattccttccccggagcacggggcgtcgatgagtattttgtcaaaatatccggggaaatatccggaaagtctgcctggttcttcgctcaggatgagcatatttccaatgccgaagacttccacatttttcagcagcccttttgcccttgaactgctgatatcattggccgcaagcacacctgtgccgcagagctctgcccccagttccgtggcttttcctcccggcgcggcacaaaggtccagcactttttcgcccggattgaccggaaggcggctggcaggcgtcattgcgcttggttcctgcagataataaagacccgcaaaatagtacggatgctttgacggagacactgtttccccgtcataataaaatccgtttgggatccacggtacgggcgtaatgtcaaaagggcagatttttttaaattcttctgtcgttattttatttgtattgacacgaagcccatagtatcttggctcctcataacaggctatataatcaggatactccccggcaaggagttccttcatcttatcttcaaatgcacagggcagattcatagtctaagtcctccatatgtatttacatttaaaactatttatacatacatagtttagtataacatatccgctgtcataactctaggaataagaatattttaatttcttattttccagtgaaagcagtacataataaggattcacgctgatttcttcccctgtcttataggagtatattccaagatgcagatggacgtcgaactggccggtcgtcccctcctcaccgtatccggaatctcccatatatccaatgaactggcctgccttgaccttgtcgcctttatgtatatttccgtacgagtcaagatgtgcgtagtaataataagtaccactatcagatgtgatcccgacacggtaccctcccttttccagccatccgaggtttgttattgtcccatccgtcatactgagtaccggataaagtcctctttcattctctcctgccatgatatctgtcccctcatgtccgctcgttccgttatatttccgctccgccatccatgaatccacaaaagataccgtgagcgatttgtccacagtggactcgggaatcgggaaataactcacttcgttttccacattttcgagcagttctctgcatcctttggaaagcttctccttctcttcgcgcatggagtctgaataaaattctgtgcggtatgtaaggtctgctatcgtctctttcttcattctgttgcggacagcccggtcatatatgtgcccggtaaggagcacggtaaaaagcgcggtgagcagcaaaagcagcaggagcctaccaggtctgatacgtttcatatgataccctttttattttactatatgaaaaaagaagctgtcccaaaacaaatactttggggcagcctctctgaacttatcgtatgctgttttacgcctcagctctttttctcatccagcactttggcttcagtgctcccggcattgcttttacaagcaggaaaatgaggagacacgaacctgttttgtcgaccaggttattggcaagtttcggaagaaaagaagctgtaaatatacttgcgccgctttgtttcagccatattacagccacatcggaaattgttcctgtcaatccgccgtatacagcgatccctatcggcgtaccgatgacaggagctacgatcccggctatgattccggcgatcactacattcagaaatgtgaacttcactttgcaaaacagcagaccgataacgagtccaacagcgatattgacgagcataaacggcatatcactcataccgtacaaaagcgcggtgagaaagttggttgctcccccgaccgcagcgccataccacggaccgaaataaactgcgataaatattgtgccgatcgtatccagatataccggaaatttgactgcagccatgacaataccgagtacaatgttgaccgcgatggccagaccgcacatcatcagttttgttgtgccggaaatctctctgttcataaacatcctccatcctcatatgtaaattataaactctcggacttatactagcatgattgtccgtgcattcccaatcggttattgtgataaacgcctgtcttatattgtatttttctataggccgtttttccgcttcaatggtataatatagacagcttttaaatgtgatcactgaaaggaatacttatgatacagaaaattataattgtgagccactgctttttcaatgatgcagcaaagctcagaaatcagaatattgaggagatgacagccgagaggaggggcaagagggaattcctcacctatcttctgtcagaaggatatgagatcatacagctgccctgtccggaatttttactttacggaagccgccgctggggacatgctgcctcccagtttgatacgcctcatttccgggcggaagcgcgcaggatgctggagccggtcgttatgcagctggaggaatacaatgcattcccggacaggtatgaactgaccggtatcatcggcattgacgggagtccaagctgcggcattgatttcacttatgacggtgactggggcggggagttcggcagcaaagagtcggtttccccggttcccggcacattgaacaaagtcagctcccccggtatctttatgcgcatattaaaagagatgctccgcgagaagcacctcttcgttgaattctattctatcgatacctttatgtccgcgcgctaatgtgcccggtctctctgtaaatggtacggtgtgcttatttgcactttgcaagcactgcctgcagatatttccatgagcgggcagtggattctatgccaaggcgctcgttgaaggaatgtacatccatgatatccgggccgaaagatacacagtcgagatccggtttctttccgagaaaaagtccgcactccagtccggcgtgcacagtagtcacttccggtttctttccaaacatatcttcatatacatcttccatgatctggcggagttcggaatccggattgaactgccatgcaggatattcgttgtagcattgcccttctccccctgcagtcttcgcacatgcggccagcacttccttcatctcctgctttttgctctccacagaacttcttgccagatataccgtcttgacatggtcggctgccgtctccagaataccgatattcatcgatgtctccacaagacctttcaacttcctgctgtatccctgcacgccatacggacaagtcacaagataagagatgacacgctctgtgcctgccttgtcgcacacgtctacggtggaatctgccgaagtatctgcctcaactgccaggcccggctcatctcccatgaattcgttgtcccacactgctttcatctcatcagccatggcctttacggcagctgcatctttgtctgccacaaggatctccgcggttgattccattgcgatgacgttgtccttggatcctccgtttatctctgcgagactgatctcaacgctctttcctatgtggttcaaaagacgccccatcatcttgtgcgcattgccgcgctgcttatgtatctcgatacctgaatgtccgccctggagtccgtggatcttaagtgtcacaatcgttcctgtcttacgctctctgtggaccggaatgagagtctcatagcgaaatcctccggcacagcctgtcgtgaggatcccttcctcctcagaatcgatattgatcagttttcttcctttcagtacagataagtctatagccatggccccacccatgccgacttcctcatctgtggtaaatactgcttcgatcggaggatgaggtatatcattgctgtccagaagtgccatgatcattgcaactgcgataccatcgtccccgcctaatgtggtatctttcgcttttacatatccgtcttcgatatacagttcaagcccttcccgggaaaagtcatgagacgagcccggttttttctcacacaccatatctacatgtccctgaagaatgaccggctcgctgttttcatatcctttagtacccggttttctgatgatcacgttgtttgcatcatcctgcgcagcttccagtccccgttctctggcgaatgcgacacagtgatcactgatgcgtttcgtatcaaaagtaccgtgcggaatctgacacaactcttcaaaaaactgaaatactttctttggttctagctgatctaatactgccatatttctttaacctctcttctttagactttttatttctataatacattctgtcacagtcatcataaaaaatcaaccttatccatacaataaaaagaaagattcttgaatggataatagcacgcatgaaacgtcgtttttttatgatccttatcatctgcatgttcggcctgatgctggtatttcccaagcctgttttcaacggcgcaagcaagggattactcctctggttcaacgttgtgctgcccacgcttctgccctttatcatcatatccaatctgctgatcaggacaaatgccgccaccctcattgcccggatcaccggccctcttttctgccggctcttttcggtctcaggctacggttcctttgcggtgctcaccggatttctctgcggatatcctatggggagcaaagtgaccgcagaccttcacaacggaggctatatatccggggaggaagggcggtatctcctctctttctgcaacaatacaagcccaatgttcatcataaactacgtgatctggcagaatatgaaggatgaatctcttacgctgcccgccgtagctatactcatggccgctccggtcctgtgcagttttctcttccggcgttactatcatatgagtcatgctgcgggcggccgtatttatcatctgccagcgcagaaagcagcctcttcaagtgttctggatgactgcatcatgaacggttttgagactatcacaaaagtgggcgggtacatcatgctgttctctgttcttatatcacttgcgcagctgcttccgtttcaccatccggcgcttatgttggccggtcttccgtctctcgagatcacaaacgggatctccatgctgtgcacgagctgttccgaaccggggcttcgcttcgtgcttgccatgggactgacttctttcggcggctggtgttctgtggctcagacgcgctgcatggtgcaggaagcagggtttcccatatttccctacataatagaaaaactggtcaccgcgggggtaaccagcctgttagcttatggttatatcgttttactgaagtaagtcttcgtcatcctctatctgaagctcttcctccggctcttccggagtgccgtactctgcttccagcgtacgcgctgactgttccggaatgtcgagctcggtgcggttgctgcgcaccatgtcatagcattcctgcagagaatttacaagaccgtcatattttgtcgtatagctgtcaagcgtatgtccgataatgctctcggcatttgcgagcagatcgtcggtgtactgcatggcgccgatccgtatatcgttggcatcgcttgtggcattgtcgagtatttcctgcgcctgttccgtggctgcggtcacgatctcatttgcctgcgcataagcctgctgcatgatctcatgttcgctgacaagctcgttcgtgtggatctgtgcctcctcgatcatgctgtccgccttcgcctgcgcatcagcgaggatcgcatctttgtttgcgatgatcttctggtaacgcttgatctcatccggcgtcttcatacggagttcacgcagaagctcgtccatctgatctttatttacaatgatcttggacgttgacagcggctggaacttacagctgtcaatgtattcttcaatttcttcaataatctgttcaatacggctgctcataatttacactctccttctattcattttctctcttatcgtatctgccacaaaatccggcacaaactgagaaatatcccctccaaaagctgccacttcctttaccgtggtagaactcaaatatgaatagtccaggctcgtcgtcagaaagacagtctcgatctcaggctccagtttatggttcgtctgggacatctgaagttcatattcaaaatcggttatggcacgcagcccccggactatcatcgtagcctccattctgcgcgcgaattctaccagtaatccatcaaatggtacgatagttaactttggcattccttttgttacttcttttaacattctaacacgttcttctgcggaaaacaacggggtttttgctttattattcaggactccgatgatcaattcatccacaagttttgaagagcgttctatgatatcgagatgtccgtatgtgaccgggtcaaaactgcccggataaactgctcttaacatatctctttccttcctgccggttctataaaaacatgcttgttcgtcttgtactcttttactttaaggatcataaatccaagctccttaagataatcaaattccgtctctctggaagcctccacgatgatcacaccctcgtccgccaaaagctccgattccgccagatactccagcactttccgttcaagctgcagaccgtacggcgggtccataaaaataaaatcaaactgcttgtcgccctccagcttatacagcgccgtcatcacatccgtggacattgtcgccgccctgtgcgaaagcttcgtccgccgcagattctccttgacacaggccatggctttcgggttcttctccacaaagaccgcctccatcgctcccctgctcagcgcctcgatgccgatccctccgctgcccgcaaacagatcaagaaaaatacagtcatacaagtacggcgatatcatattaaataaagtttccttgatccggtccgttgtaggtctcgtatccataccttccagcgttttaagctgcaaccgctttgcactgccagcaatgactctcatacatattacctcttatattctttgtaacatttccagtttattataaggatttgtcagaaaaaagtcaatcagggacagggatattttagttggggacgggggaaatttaaatttcccccgtccccaactaaaacccagccttccggctcatagaaaaaagcacccgacaggtgttattgcaacctgtcaagtgctttttctaatcatttaatctggtatttatttaccagccatctgtttttcttgctgctcgatcattttcttaaccatataaccaccaacagaaccattctgtcttgatgtcaggtctccgttgtaaccttctgttaacggtactcctaattcgtttgcaacctcatatttgaatttgtccaatgcaccctttgcctcaggtacggctgctctgttagatgaacgacttgccattgttatactcctcctttttcttatcttattgagcatttatctgctcaataattgtttgtaactttttgttttttgttacaacgatagtatatggaggatttagattattacactagaagttccttcatattttggaaattttttcaaccattccttttcattatttaagagcagatccgcggcttcatttgccttctttagaagctgtgcatcctggaatacatcgccgagccggaagtccatcagtccgctctggcgtatgccgaacagatctcccggcccgcgaagcttaaggtcctcgctggcgatcttgaatccgtcgttcgacttgttcagtatgtccagccgctcttttgtctcctttgatctcgaggcgctcataaagatacagtaagactggtgccttccccgtccgacgcggccccgaagctgatggagctgcgccaggccaaaccgctcggcgttctccacaagcatgactgtggcgttgggcacatcgatccccacctctatgacagtggtggacacgagaacctgtatctcatttcttccgaaccgttccatgatatcatctttttccgcctgcttcatccttccgtggagacaggcgactcccaccgcctcaccgagctcatcctgcagcatctgtgcgtaatccataacgttctccacctcaagatgctcgctttcttccaccatcgggcagatgacataacattgccggccttctttcacctgatttttcataaacgtatatgccgtcttccggtaaccggtatctacgacacagtttttgatcggaagccggttcgcgggcagttcatctatcaccgaaatgtccaggtcgccgtataaaataatggcaagagtcctcggtatcggtgtcgcgctcatgacaaggatatgcggcacacctccctttcgggcaaatgcttcccgctgcttgactccgaatctgtgctgctcatccgtcacgacgagtgccagatttttataattcactttttcctggatcaaagcatgtgtaccgacgatgatctgtacctccccgctttcgatccgcccgtatgcctctcttttttcctttgctgtcatggagcctgtgagaagctctgcaccaagcctgaccccatattgggaaaataaattcgtgatggattcataatgctgtctggccagcacttctgtgggcgccatcagtgccccctgatatcctgaaaaagccgtatccatgagcgccagaaccgcaacgatagtcttgccggaacccacgtccccctgcacaagcctggacatggccgaagcgccggccatatcggccgatatctcttctgcgactttcttctgtgcgccggtcagttcatatggaagctgcgaaagaaatgccgccgtctccggcgcctttttgaccggataatggttctgttctttctcattactgtccttcagcctccgcagcgccagaataaactccagaaattcttcaaacacgagccgttctctcgcatgatagaacacctctttgtcctccggaaaatgaatgccccggatagcataattgtactctgccagcttatacttaagcctgatctcatccggtaaagtctccttcgtcagatccagctccataagcgcctgccgcaccgccttcatcacggcattgttggacagcccggcagtcagggcatagaccggctgcagtgtgtgaagcttctcttcatactttgcgcttgggtaaaaaatctccggatgttccagcacaataccgctttttcggtttacgatcctgcctcttagcgttatgacgccgccctttgcaagtgtattgcgcaggaacggcatccgaaaccagatgaccttcaaagtgccggtgatatcttttacatagatcgtggtcacctgcatattccgggtgccggacacctgcacccttccgaagatcgctcccgtcacggtcacaacgctgccttcttccgcctcactgatcggtaccgggtcgtcatagacgtcatatccccgcggataatagcggaccaggtctccgaccgtggcgattccaagccttccaaacagcttttctgtcttatcccctattccctttaattcctttattctcgtcaattcaatcataatttcaacctttgcacaaaccatcagaatacaaaagagacagacctctgcatatcacagggagtctgtccccttttctctttcttattccacagccagtacgtaataatagataggctgtccgccgtagtgcgcatccacatccacatcaggatacagcgcctcgatctcggcggtaaaacgctccgcgtcgtctttctttacttcctcgccgtagtacaggctgataagctcagaatcttcatccaccagattgatgagcatttcacgggtagtcgcctccacatcctgtcctactgccagaatgcccttgtccccgattcccataatatcgccctcgtggatctccttatcatcaatatgcgtatcccgcacagcatacgtcacctggccggacttaacattcttgatctcctcgagcatcgtctcttcattgacagccgcatccgcctcaggcataaaattgatcacagcggtaatgccctgcggtaccgtcttcgtcggaatgacgataatgtctttatcctctacaagcgcttttgcctggttcgcggcaagcacgatatttttattgttcggcagtataaataccgtatctgcgttcacctgctcgatggcattgagcatatcctccgtactcggattcattgtctgtccgccttcgataatatagtcaacaccaagctccgtgaagatctcattcagcccttctccgatggaaacagcgataaagcccatcgccttcctcggctcggaaggtttcttcgtctcctccgccttctgctgcgcggcaagcttctgcgcatcccggatcagcttctcctgatgttcctctctcatattgtctatcttcatccgcgaaagctgcccgtacgtcagcgcgcgctgaatggcaagacccggatcattcgtatgcacatggaccttcacaacgtcgtcgtcagccacacatacgatcgaatcaccgatggatgacagatacgatttaaatcccgcctcatcgtcatctgtaaactctttttccgtcaggataataaattccgtgcagtaaccgaacttgatatctccgctctcctgagtgaccttcggcgccgccgctgccactttggccggctctatggcactgtaatcgatctcttttccctggaacgcgtcgtaggctcctctgatcacttccagaagtccctgcccgccggaatccacaaccccggcttctttcagtaccggaagcatatccggcgtcttctccagcacttcttccgcatgcttgatcactgccggtataaacagttccagatcgtcggtctcttccgccatctctgccgctttatcggcaatgccgcttgccactgtgaggatcgttccctcttttggcttcatgaccgccttatacgcagtatctctcgctctggcacatgccgcggcaagtccgagcgtatctatctctttctcctcacggatagactttgtaaacccgcgcagaagctgtgacagaatgacacccgaattacctctcgccccgcgcagagagccggacgagatcgcttttgcaagatctgccatatccggtttgtcaagcgccgtcacttccctggccgcagacatgatcgtgagagacatgtttgtcccggtatctccgtcaggtactggaaatacgtttaattcattgatatattccttcttagcctcaatattctgcgctccggccagaaacatcctggcaagcatatccacattaatagtttttgtagccacttcttatgttcctccttaactaatcgatgactctgacgccttcaatgtagatattgatcgtatctaccggcattccggaaaattcttccactttatacttcacattactgatgagattctccgtaacggctgaaatactgacaccataagcgacaacgatatggaagttcagagtaatatggttgtcttctgaaatgctcacctgtattccgtgggtaagactttccttcttcagaagatgaacaaaaccatccttcatatttacagcagccatcccgacaattccaaaacattccacagccacagtccccgcatacttggcgatcacttcagggtcgatcgtaatgataccgagatctgtactcatacatcccttcatattaaaaacctccaattctctaaattgaaaatgtaatacacaagcttaacaaaaatattatactattaattcccttattttacaaataaaaaacccagattccataagaaatctgagttttaactttcattacgcacgctcaactctgcctgatttcaaacaagaagtacaaacatacattttctttgtagctccgtttgctgttttaacacgaactgatttcacgtttgatttccacatctttggtgattttctatgagagtggcttacattgtttccaaagtgagcacccttttcacaaatagcacattttgccatgactgcacctcctaacgctcataataagtcctttcccggactcgcaacactgattattttatcagaagtgtgcgagaaaagcaagtacttattttgattttctgaataatattactttttcagatgatccagcagcttcggattgcgctgaagcacatacagcagcgccggcagctggctcacgacagatacaaacaaggtaaagaaaaagtaaatttgaggaaatccccaataacgcatctgtgtaaacagactgatgactcctgtcagcagcgtcataccgaaaataacaaggagcgccacaagcaggaccatatcgcagcgccttcccgcaagctccatgataagacagccggcagccgtcaatgcggcaagcgccagtattacagaacagaaattgtcaaatgcagaataatagttccacacccatgaataactcgtatacgctgtgatcccggaaacacgtatgccggataagaataaaagaccgaagtaggcgatcaaagggatgatctcatactgtctgtattcccgccgttccatgaaacagagcacgccgaacgccgcaaagcacacggcaggcagtataaattctatcattgagaacagactgaaaaatccggccccggcccagagtctgtcgatgatcagcaggacaaaggccgctgcggccacgaccgcgttaagccgccccggcgtcagtgattttataccatccagaccggtcgctggcataccggaagcctgtttctgccctgccgcatttgcatcataggaaaaagacttcggctgtgagcggtccgcctcaccggcgcgctcattttttgcgccgcactgcggacagaaacggtctgatgtaaacatcttttccccgcatcttgaacagaaacaagtcccgccggaagccgcgccgtacgcagcctctgtgcctgccgggccgccgccgtaaggcggaggcgtcggattgccgttttggcggttgtacgcatcggcgatcaggttggcgttcttgataagtacattgaaggatagaaaacttccgacaaaacatatgaggcatccgacgagataccacataagaaattcgcctcctccttccgcgacggccactccatatctcggccctgcttttctgaggcggtttgcctgcttgtagaaccagtacagtccgtaaattccgcacgtgatgaaagacagaagaagcacgagtatgtaattcatgctctcctcaccgtctccgcggcacattctgtttacatcttccgtataagaataccagaagaatatactgtatataccgcatgttaaaaatgtcagaataatatatgtagcgagacttctctctttgatcatttttatcccccttgtattgctctcattattttaaaaatgagcccgtcgtccagatcgatctttatcacaccgtccggctgaaagccgacgcggtatatatacagtgccagcagaagaaaaagcagaacgccccccaggatacgggccgttttctttttcagccggaaccgctcaggaagcacatccttatgaaagatataccagatggcaaggccggtcggaagaaacagaggatgataagaaaatgaggcggcaaagtcaagacgcgccatactcttaaaagccctcgtcatcccacagcacggacacggaatgccaaacaggtattcaagcggacacctccagatgaaaagcagcagcacaaacaggccgcttatgatgacaatgtgacggactattatatttctcttcattatcgtacttttgtcccgcactgattgcagaagaccatatcatccgacagtgcattcccgcatttcggacactctcttttgtccggcggtacgggaacggcattctccagatctttaagctttccgttcaactgcgctatgagcgcttctttttccttcagttcaagttccagcgtacgtatgcgctcctccttttcggacaacaccttctgctgcttgtccgtttcactcttaacatacgctctgatctgtgcaaacagtccgtcaagcccgtccgcctgcgcatctgccttttccacctgtcctatgaattgactgctgtccggccgactttccgtcttttctccgcagtatgtacaaaacagagagccttcacgcagttcacttccgcattttacacattttatcatttgttcttcctccagtccataaaaatagatgtcataaatacataaaaagtgcagttcctgccatgacagtaccgctgcactttttcatacgctattctttgccgcaaaataactcataccccacaagcgcacacactatggcacatatcaactctataaacggatgtctgacgagtatagtaaatatgatccccactgccagacacaacagggcaaatcccaccactcgtttcattcaataacctctgcaccaattctcactatattatatgcgcgctttcaggaaacgagactgtcagtctgcaatatcctccgccgcttcggcttcattcagaatatcatccacatctttttcggtcatcttatcttcaccttttgagccgaacttttcaatgacatcggggatcatatccagtatcttcgtcatcgtatcctgatttttgatattcacaagctttgtatatccattctggatcacgaggaccgcgcacggcgtcatcttgccgcctatcccgccggcgcctctttctttcttgtcaccgttgaaggcgcctgctcctaccgcgaacgatacgtcgacaagaggaagaagaatcgtgtcccctatatggatcgcgtcacctaccaccgtcttcgacgtgatcactccgtccatcccgtggaaaagagcctccaccgttcctttaaaattattttcagccatgtccgtttcctcctcaatcaaactataattcaaaactccttgcgtgcttatacgtggcgcggacctctctgcaccagaacagattccataacagcaggaaaaaatgcaggatgtgtaccttccccttgataagcagcgtaccttccagtatcttctgctcaaagtccggaacgatctcagtctgtttccccataaaaggatacagaatgctgagtcctgccaatacttgtcccgttctgtacgggtcctcgaatccatagtgtatctttgctttcaccgtcttcggcttcagacgtccaagcagccgcagcgcctcttttttcacctttgtaaacgcggtcttatggatatcgtccagtatgaacgcactgagcttttccttcttttctgataatgcctttattttatcacataatcttagaattgtacattttatcttacggaatgtctgcctgcacttttcataaatattttcagatttcctgcgctttttacgagggccggttttttctttctgagcatctttttcagtttctttccgcttcgtttcagttctttcaggtagtcgggattcttcttcaacttctttttgaacgctctgacgctcttcagcgcggccttcatctgttttttccgtctcttccagcatctctttgtattttgcttcatcatcttccacttcctcatcaaattttttaaaatcgccggcatctgtctgttcttcctctgccatcttcttaaaaaatatgcgcagattccagtcaaactcccctgcgcggtacgaggctttgaacgtgacaaggcgcataagccaggtacatctaatatctgcctggatactgtccgccgaaccgccggagacagcctcgatacggtatctgaagggcacaaaaagcacaatacaaaccaacaatacaagtatccccagtattgcagctattatgattcctatgatcttcaagataagcagtatgatatgtaacatctcagtcttcctgttctttttctaatatataggaacgaatgtccgtcccttttgtttcatgatatacctcttttgttattttttctacaagttcaagcgcatcgtcataactttttgcgatccccacgacaaaataatcttctttcgggtaatccggctgaagaagaaggactgaattaatgatctccagctggttgttctcattccgcggcagtacaaggaggtgaatgctcacctggaacttcttgttctccagtttttttatgatcttatccttctttttttcaagcccttccgtaaaatacatatgcctgtaatatttcatcttactgtacctctttcccgcagttcctgcggacttactgattataataagcgtcaaacacctgctttgcgacattgaccgctttggcagagccgtcggaggcctctatgatgacgcttatgacgaggtccggattgtcaacgttcgtcataccgataaaccatgagtggtctttttccttgtctgagctgtattccgcggtcccggtctttcctgccgccgtatacccctgtccgctcagaacggccgcggttccgtactgtactacatctgtcatatattccttcagcttcgccgcctccccggaagtcatgagcgtcccggctttttccggtttattctcatctacaacagtacctccataattggtgaccgcctgcacgagatacggtttcatgagcgtgcctccattggcgatcgcagacgtgatcagcgccatatggtaaggacttacctgtgtctgtccctgccccatggccgtcatcatcttctctccgtcagaagcgccctttttcagcgtaaacctgcttttactgtacgggagttccgaggggagcttggaatcaaacagaagttccttggccgtatccctgaatttccctacatccagcgacagtccaatattggaaaacgacgcgttgcaggaataagctatcgaatccgcgaagtccacctgaccgtgtacatgattgttaaaacagtgtatggtcagacctccgtgttctatggccccggtacagttataactgtaattttcataatcagagtgttccctcatatattcaagcgcagtcactaccttgaacgtggaaccgggcgcatactgtccctgcgtcgccctgttcagcagaacactgtcctcgctggaattcagagattcccaattgtccgccactgagttcggatcaaaatccggcttggataccatggccaggatctttccggtactaggctccagcgccacgaccgctcccttgtagcttccgagcgcgtcgtacgctgcctcctgcagatttgcatccagcgtcgtgacaacattgtctcctatattcttcttatcctgaaactcattttttaatttctccagaaaaaaagcatttgacgtgagcagttcaaaattttctacagattccagtcccgattttccctggacactgtatccgactacatgggcaaacatactgccgtacgggtactccctcgtctcacttccgtcttccgccacattggtctgtgcaagcacattgccgttcttgtccaggatcttgcctctcacgacccgttttgcataggaatcctgccgcgcattgtatggactgcggatgatatccctgctttttaccacgttgaaatatgcaatatatcccataagaacaaggaacagacccacgaatgcgtaggtgactctagcgaactctttgtttcgggcgcgctttgcctttttccggtgcttgtcggccttgttggcttcttttcggtctctgcgggacatctgacgcttttcctcgtctcgttttaatttcctgtccgcttctctttgctcgtagcctttcctttttctttctttcaatatcttcttcctcgtcttctcttaatatatataagccctgaataatagcaaacatgatcatcgtacttaataaggaacttcccccgtaactgacaagcggaagtgttactcccgtagacggtatgaacttcgtcacaccgccgatcgtaaggaatacctggaatatgtagcatgttccaagtccaagagccaccagtttataaaacatactgtggagctgcatcgcgatattcagaaacattacgtaacagctgacgcagatcaggatgatacaaagcgcaaatatgatccccatctcctccgatatgacagaaaagataaaatctgaatccgctaccgggatcatgtccggttccccctggcacagccccagtccgaaccagcttcccgtgccgatggcgaacagcgactgcgccacctgataaccgccgttattgtaggcggcgaaagggtccctccacacaatgacacgggtccgtacatgatcaaacaggtaatacgcaccgacagatgcgacactgccggctccgagtcccgcgactatatagagcggctgcctcgtagccacatagagcatgaccagataaacgacaaagatgatgagcgcggctcccaggtctttggagacaacaagtatgagcacatggaaggcggccagcgctgtggtgatcacgatatttttaaactccagcgacatcttgaagctggacgccacgaaaaatacaaagatgatctttaccagctccgacggctgtatattgatccctgctatcgtaaatccaagctttgccccataggatacctggccgagtacgactacaacggcgagcgatacgattcccgccgccgcataaagttttctccactctgccagcttcttgaacttacgtatgataaccggcacagcaagacttatggcgatagcgcctgccgcgatgacaaactgctttaccgcatttgtataattgagccgcgtcagcatgatcagcccgatacaaagcagcatgcacagattgttgacaacaagccttgaaactttcgggtaaatgatcgtataaagcagtattgtggccccgaacagtaccacctgcatgagataaaaagcgagcagtttgatatcctcggtctccagatacattacgagaaacgcaataatatggatcatgtacataagcacattctgtctgcggagcatgctttttttccggtccggatcctgatagccaaatatactgaaacagagatacgtatacatggttataagtatgatcatcagatattttgacagctctacaataatatttaccaaaacttcacctacttcactccccgcttgaaatgtccttttgtaaaatccatatccggggtccttatatctttctctttgataaagacgtctgtgtacagcgccgtgatcttctgcatctcctttgcatcttccgtcgtaaaatcaagacggatcgatgcaggtgagagcgagtttatctcctttcgctgattcaaaagaacgagcggagaagaattataaattatattataacagtattcacagcaatttttaaccgcaaattttttctggtatctgtcctttatatatgtcagaccgtcactgtgcgtacagcggcctgttgtcttctgcacacagccggccgtgaccatcacgggctgatagccgtatgcaacgaatgtgcagtcggaaacgccgagttctttcagttctcctgcgttcagctccgccggggccgtataagattctatgcgtgtcttcttcagaaattgcttcgcataacggttgaacacatagatattggcatctgaaattatcttccggtcataccgcttcccctccagccactcacagctctcccagttgcgcacgagaacgccgtcaaacagttctagaagaagggcatatttccgctcaaacttttcagccgtgggactgcggaaaatatagggcagagcggcatacacttctttccccgactcccccgccttttgcacaaggcttcgcaaagtcttttcctcagccggcacaagcataccgctgtcgacatatatggcacggatctcttcggcggataccactgctttgagttgttctgcattcatgaccgacactgccatgacggccggcctgtccgtctcacttttctgaccgacagccctgccttcctcgtccggcttgaaatgagccgcctcatcctccgttctccggtaaggactcagcagactttcctcaaggcggccaagtccttctcttctcagttcattcaacgcctgcatcggaagaaacagctccccgtccatgcggatatccagcctgtcaaagacaaattgtgtgccgccggtctttctcatctgcttttctatcctctctgcgctgaggggctgctttaacgcctgctccggcgccataccctcgcagactgtctttgatcctttgtgctcaagctccagtttagcacgatttccgggagaaagtattaagttaccattaattttttcttggatttcaaacgtacggcgctgcggcggttcttctttgccctgcggcctggaaaaagatatcatatcttttccgttatgccgtttataatacccgtcacagtatccccgtcttctgtacgccgtatacagccgctccctgtctcttgtgtccaccgcaaagccttctcttcctatctcataataaaggtccgcgtatgcgcggtacatgctcacaacggtatatacataatccggctgtttcatgcgcccttcgatcttaaaggagtctatgccggcctcgatcagttccgggatcaagtctatcgcgcagagatctttcaggctcatcaagtcggccggtcttccgtcccctatgctgtaaggcaggcggcacggctgggcacactgccccctgttcccgcttcttcccccgagcaggctgctgagcagacactggccggagtaacaatagcagagcgccccgtgcacaaagcattctacttccagaccggtctctctttttatcgcagccacctcggcaagcgacagttccctcgccggcacaacgcgcatgaccccttgtctcttcataaaagcggcgcccgccgcaccggtgatcgtcatctgcgtgcttgcgtgaagaggaaggtccggaaaatatgaccggatatactccgccaccccgatatcctgcacaatgatcccgtcgatcccctgcctgtaataaggaagcagataaccgtacagttcatctatctccgagtctttcagcagcgtgttgacggtaagatacagtttcctgccatgtacatgcacaaaatcaactgcccggagaagttcttcctcccccggattatccgcatacgcccgcgcgccgaaacggcttcctcccatatagaccgcatccgccccggccgcgaccgcggcgttcagactctccaccgaaccggcgggagccagtatttccactttattatccattgctattcgcccttcaataaagaatgtgccttggcacattcttgcgctgagcgcggtcgcctgcgacatattacttcttcgcgcgagcgcgcttcccccggagggtttttatgacataggaaacgaagtttcctatgtcataaaaaaggctgtccgccgacagcctatttcttgtgattatttttcatttccgtctccagttgaacgatcttcatctggagttctttgttttcctctttcagcttgtccatcgtcttctccgcattttcaagcttgatctggacggagatcagttcatgtttcagatcatacatctctttgtcttttgcttcaatatcactctccagcgtgccgccctgcttcttagccttaaaataatcatcggctatattaagggccagcaggacgcttctcgtctctgcactctgtttacggtacccctcgctgctgctgcactcttcgatcttatgattcagataggtggaaactttctgcaggtactcctcactctcgaagccgcttaaagtaaacaccttaccccctattaaaacttccgtaaaatttttagatgatgccatagaagcctcctctgcctttcatacatactctggtaatattataaactaatctttcgcaaaaaccaactatttttcattattttccattgaaattccaagatgccggcaggcggcctccgtgacgaccctccccctcggcgttctctgtataaatccgttcttcagcaggtatggttcgtacacatcctctatcgtaccggcgtcctctccgactgcggccgccaatgtgtcaagccctacaggtcccccctgaaatttatctatcatcgtaagaagaagtcctctgtctgtctggtccagtccctccttgtccacgtcgagcaggtcaagcgcatagttggccacctcctctgtgatatacccgtcatactttacctgcgcgaaatcccgcactcttttaagcagccggttggcaagccgcggtgtaccccgtgaacgccttgcgagcgcatccgcgcctctttcgtcgatgcccacctccagcacctgtgcggaacgcagaatgatcgtcttcagttcgcctgccgtatagaactccagccggttgactaccccgaaacggtctctgagcggcgctgtgagcatgcccgcccgtgtcgttgcaccgacgagcgtaaatctgggaagatcgagacggatggagcgggcggtcgcaccttttccgatcattatgtcaatcgcaaaatcttccatggcagggtagagcacttcctccacctgcctgttcagtctgtggatctcgtccacaaaaagcacgtccccctcctggaggttattgagtatagccgccatctcacccggcttttcaatggcaggtccggacgttatcttcatattgacattcatttcgttggcaatgattcccgcaagcgtcgtctttccaagtccgggcggtccgtaaaacagtacgtggtcaagtgcttctcctctttctttcgccgcctcgatataaatcttcagtgtctcttttgccttttcctgcccgatataatctgtgagcagctgcgggcggagattattttctattttgatatcctcttccagattctccgtagtgattattctcttactcatgttctccccttatattaaaacatcatatgcttcaaagcgcttttcagcacgtcttccacttccatatgttctgcgatctccacctgttttacagccttcagcgactctgtgctgccatatcctagcgccacgagtgcctgcaccgcctcactttgcacttcgttcacactggcggccgccgctgcagacgtattctcactgccatgtgccgcatgttccagcacatcttcgatgcgcagcttatccttcagttccagtatgagcttctccgccgtctttttcccgatccccggcgctgcctgtatcgccttgacgtcattggatatcacggcaaacctcagatcgtccggtgagagggcggacagtataccaagtcctcctttcggaccgatgccgtttacgccgatgatgagccggaatatatccagatcatccctcgtgagaaacccaaagagctgcattgcatcttccttcacattcagatacgtatgtatctttacttcccgcccggccggcggaagcaggctcatggactgccctgacatatagattccatatcccacgccgcccacgtccacgatgaccttatcctcttcaacagcggccagttcccctcttatatatgatatcatagttcctcctaaaaaataatattgacaagacgctttagcatgccgtcggctgcgatcccgatcagcagaccggtgataagcccggcaatgagcagtacaggtatgtagtatatgacactgaatgtctccaccacggccatggcgatgacaagttgtccgatattatggcacacccccccggcgatgctgattcccaggatactgaatccgcccttctttttcagaagcgccatcactgtcaggctgagaagtcctccggcgagactgtagataatactgaagtaatttccaaaaataaatcctgaaagcacaactctcacgacagataagagataagtctctttcaggctcatcttatacaatgcaacaacgatgatcagattggcgagtcccaatttgactcccggaatccctatatggaacggtatgagagtctccacatagctgaatatgagcgccagcgcagtgaacacaccaaaataagctaccctgtttttcaccccggtatcctcctaattggtcacagcgtcgaattcgctctcttcactgctctccacttccacgactactttattcggaagacagatgatattttcatgattcatggagaccgccttctgatgcacgcagagctggtccgggcagtcagcgcttatcatactcgctttcccgtttttgatctgaagaatatttgtcccgccgttgatactgacttctctgtccaccgacagactgtacgtaccttcgatctctccattcaccttcaccgtgacgcagttggcgcctctgcctcccacgacctgatgaaacagaaaagctcccccggcgacacatacgataataagtatgagaatccagtcttttttctttaacttcatttttcatatacctgccttttctctctatggactattctagcacaagaaaccttcccccgcaaccacatgttcgattacatgacacgatcctaatttcgattgcatatcctcccgttcgtggtataatatgaacgatgggcagtaagaagagactgttctatataataataattacaaataagtataaatatgaggtgttttatgaaatataaaaaatttacagcactcgccactgcagctatgctgctcatgaccggctgttccggcctcccgaaagaacgtgacagccagacgtatacggataccctttttgacacggtgatctccgttcagatcctggacagcgtggatgaggatgtcctgaaaggctgcgagacactctgcaaaaaatatgacgccatgttctcccgcacaaatgaagacagcgaaatatcccgcatcaacagcgccggcggcgtccctgtggaagtgtcggatgagacggtcaagctcattaaaaaaggaatctattacagtgaattatccggcggcgcgtttgacatcaccattgcccctgtcgtaaacctctgggattttcaggcggaagatcctgtcccgccctccccggaagatgccgccgcggcagccggccatgtaaattacaagaacattgtcatatcggacaacaaagtctctctttcagacccggaggccgggatcgacctgggcgccatcgcaaaagggtacattgcagaccgcctgaaggattatctcgaaaaacagggcgtgaagcacgcgctcatcaatctggggggaaatgtactcgccctcggtacaaagctggacggttctgattacaacatcggtatccagaaaccgtttgacgagagcggaaatcctgtcacttccgtacgcatttcagaccagtcggtcgtcacatcgggcatctaccagagatattttaaaaaggacgggacgatatatcatcatatactggatccggccaccggatacccatgtaaaaataacctgtacagcgttacgatcattaccgactcctcactcaccgcggacgctctgagcactacatgttttcttctcggctatgacagaggcatgaaactcatagaccagttggacaatgtagacgcagtatttatcacggacgacaatgagattcattattcaagtaatttccaaaaataaaatacaggaaacagagtcagggacagcacgcgaatcacatgccagaccctgactcttttatttccgttatatcagatcctgcagctgcgctgcttcactttctagtaatatctgtatgttccgatagaggccactccgaatatgaacaaaaagattattgccaataagaccgcaattcccataattataaggtatgcacggcagtagtttctccggttgatatttccgttctttccgaatgcccacacaaaataaagaataatgcccacacacggaataaacgtcatgatcaaaatggtaagaagccagtctcccatggacatgggactctggtccatacctgtatcgtagctcgtattataaccttcattatttcccacattgtaattataattgtcctgatagcttccccggctgttctgactgctgctgttgccattgtatccgtactgtccgggagccgcgtcctgtccgtacgtactgttctgactgtagccttcattcggatccgtgtatgtatactgcgtgctctgcgggttcgtctcatgcgccccagtattctcttctttttgggagttggcctcttcgttcgtattttcaggtgcgttgtcaaagttgttctccatcgtaatgtcctcctcgatcatattaacgctattttatcatgcacattgtataaatgcaagagggccggtttccgtgccgggaggaatccctcccgcacagaaaatcggccccgctgtcctttttttgcactacagaatgatctttttcggacatttttcagcacatgcaccgcagttcgtacatttctcggaatctatgtatgcgatattgtctacaacctttaccgcatcgaactggcataccttctcgcacattttacagccgatacatccgacagagcaggctttcatcacatccttgcccttatcttttgaactgcactgtacgagatgtttctggtcatacggaacaagctctatcagacgcttcggacacgcagcgatacactttccgcatgctttacatgcctctttgtctaccacagcaaccccgtcgataacgtgaatagcatcaaaaggacatgctttcacacagcttccttctccaaggcagccgtaattacaggatttcggtccgccattctgcatcatattcaccatgatacagtcatttacaccgtgatactcataatcctgttttgccttttcacacgtacccgcacacttaacaaaagctacctgatgtacctgctctcctgcttcctggcccatgatctcaccgatctttgcggcaaccggcgccccgcccacggggcatccgccaacttccgcctcgccttttacaatggccgcagccagaccagagcagccggcgtatccgcagccgccgcagttattaccgggaagtacccccatgatggcttcctcccgctcatctacttcaactgcaaatttctttcctgcaatcccaaggaacacaccaatgaataatccggtgccgcccacgattacagcagccataataatacctgttacactcattgtcagcccctcctatattagtccggagaatccgaaaaacgcaatcgccataaggcttgccgtaatcaatacgatcggagttccctggaaagattctgatacgtcattatactcgattttctcacggatacctgccatgatcacgatcgcaagtgcaaaacctgcggaagtaccgatcccattgatcacaccctgtaaaacagaatattctttctgtacattcgtaagtgcaacgccgaggaccgcacagtttgtcgtgatcagaggaaggtatacgccgagcgcctgatacagcgacggtatggccttcttaaggaacatttcaacaaactgcacaagacaggcaataacaagaataaatacgatagtctgtaagtagactaatttgcctcccatgatcgcttcatttgcaagaatgaacttgtagatcagactcgtcacaaaagacgcgatcgtgataacgaagataactgcgccgcccattccggccgcggtctctactttcttggatacaccgagaaacggacagattcccaaaaactggctgagtacaacgttattaacgagcgcagaaccaattgctataataagtaattctctcatgatctatgtactcctcctattctttctcatttcctgtcggaaaaactttgccgccgcacgcgctgtttgtacatgatgcacagccttctccgcaggatactgtctctacttgtttctttccttttcttgccgcgttattcttcactttgttctgaagagccgtaagccccgcgagaacaaggaatgctcccggtgcaagaataaatatggtgaccggaacatagcctgcttttccgacagaactgtctgccaatggaagaagctggaatccgaatgccttgccggcaccgatgatctcacgcacaacaccgatcgccgtgaggcctaccgtaaacccaagccccatcccgataccgtcaaagatagacggaagcaccgggttcttggacgcgtagctctctgcacggccaaggatgatacagttaacaacgatcagcggaatgtagatcccaagagaatcgtacagacttggaacaaatccttccagcaggaactgtacgatagtgacgaaggacgccacgattacgataaatgccggcattctgactgaatcagggatgatcttgcgcagcatggatatcaacatattggaaagcacaagtacgactgtcgtggacagacccatacctacaccgtttattgcggatgttgtcaccgcgagggttggacacatacctaacatcaggacgaaggtaggattttctttgaccaaaccgttatatactctttcggtacatttattcatctcacactacctccttaaaatgcattctggtaatatccgagagcagcgttgaccgctccggttaccgctcttgatgttatcgttgctccgctcaatgcatcgataggctccccgtctccgccatccttggacacaacgaatctgtctgtctgctttccttcatactgcttgtaaaatgcaggctctgtcgctctcattccaaggccggcagtctcactgatggaaagaatcgagattccgcttaccgtcccgtcattcttgataccgactgtgatcttgatatcaccgccgtatccttctttgtcggtcgctgtgacgatatatccggcttcaccgccctgaacctcacagacttcgtcgatcgtagcttttactcccaggtccttgaccgccttgtcagccgccttcatatctacatctgtctctttaaaatcatccgcagacgcctcagggaacacttgctgccatgcttccttcttggccgcatcctgtgcctgcgcgatcggctcctttgtgatctcatatacaaagccgaggccgatacctgacacaagcgtgattattgtgaggatgatcgcattttttacaattttattcattatttttctcctcctttaccaaatggttttggaagagtaaccttctcgatcagcggtacaaaaaggttactgataataatcgcataggaaacgccttctgcggaaccgccgaacagacggaacagtccggtcagtatgccaagcatggctccgtatacaagctgccccctcttcgtgataggtgacgtgacatagtcggtcgccataaaccaggcgccgagcataaggccgccgccgcaaaggtgcgccgtaatatactgcacatcgaaaaatccgacatttgcattgctgaattgtccgaagatgccgataaagatcacaaatgtaacaatatatgtaccaggaatacgaaggtcgatagcgccgatcagtatcaggaaaatagctccgattataatggcgatcacggaagtctctcctattgttcccggtatcgtaccgacgagcatcttcattgaatctacagactgcccgctcttgagcagcgcaagcggggtcggtcctgtcactccgtcatagataaaggtcgtcatctgccctgtaaaagatatgagcagaaaacatctcgctccaagagcagggttcataaagttctgtcccagtcccccaaagagctgctttaccacaaggataccgaacacactgccgagcgcacccatccaccacggagcggacgccggcatgttgagtccgagcagcagaccagttacaacagcactgaagtcattgatcgtgacttttctgtgcatcagcttctcataaatgtactctgttaaaactgccgagaccgttgtgcttaaaagcataataaacgcgggcagtccgaagttccaaacgccgaacgccgacgcaggcagcagcgcgatcgtcacacacagcattatattggctgaagtgactttggaacgtatgtgtggtgaagatgacatttttatattgttctccacgttagttcacctcttcctctcatttctagtttattttttcttgcggttggccatcgcaatttttctcatagaaccgatggactgtttcagcggacgttttgcaggacatacatagctgcatgaaccgcattccatacactccagcccttcctgttttgtaaatgcctcttcatcgtgatgttccgcataatccgccagtcttgaggggatcagcctgctcggacaggcttccacacagcggccgcagttgatgcatgcggtcggctcatatttggccacttcatctttcgtaaggcagagaatagacgaattcgtcttcgtgatcggaacgtccagtgtaaacatggagaatcccatcataggcccgccggagatcaccttctcaggctcttctttgaatccgcctgccgcttccacgagctcagcctgatttgttccgaacagcactttaaaattacccggctcatttacggcatctccgctcacggtaacgacgcggtctattgacggtctgccttctgccacggcctgatagatattgatcatcgtctccacattgtccaccacgcatcctgcgtctgcaggaagcattgcagaattaatggcccttcccgtcgtcgcatagatgagctgacgctcaccgccctgcggatatttagtctttaatgcgagcacttccattcgcggctcgtcttttgtcagctctctgagcttttctatacaatccggtttgttatcctccacgccgaaaataccctttgcgttgtcaaacagcttaagcactattttcattccgccgacgagtttttccggagtctccagcatacgtctgtagtctgcggttatataaggctcacattccgcgcagtttgcaataatataatcgatcttgtccggctccttcggcgaaagctttacccttgtcgggaatccggcgccgcccatgccgacaactcctgcttcaccgatcgcatttaaaatgtcttcttttgtcatctcgtccagaggttttgccggcttatactctgcttcttcatattcaccgtcattttcaaccacgacgcagttcacagttgcccctgtcggattcaggtgcggctctatagccttgactgttccggacacagaagaatagaccggtgcggacacgaatcctccggcttctgcaatcttctgaccctttaatacacgttcacccacctcgacgatcggactggcaggcgctccgatatgctgggaaaccggatatacaagatcacctttcggttttacttcgacaatcgccttatcttttgccaggctcttgccgtcatcagggtgcacaccacccttaaacgttaacaatgccatcccattttccttccttcctgttttctctttatatactatacaagaaaatacccgctttatctagtaaatacaggcaattctttgtatatttccaagtacatcttgtcgaaattttaacatataaaagatagagactatacagtctctatctcctaatttcgacacggctcatataccgcattattgttcggttgttgtatcctcatatgtctctgacgcatcatccgcaacatcttctacactttcctgtaccggtgtgtccggctccaaagccttcatgctgagactgatcttcttttccgcctcatttaaatcaacgatctttgctgtgatctcctgtcctaccgacagtacatcggacggcttatccacatgtgctctggagatctgtgatacgtgaagcagcgcgtccacgcccggtgcaagttcaacaaacgcgccaaagtcagtcatccttgccactcttcctgtgatgctcgttccgactgcataatcgtcggatgcgttggcccacggattcgtctccgggaacttaaggctcagcgctatcttcgtgtcattgatatccttgatcaatacttttaccgtatcgccaacctggaatactttcttcggattctcaacacgtccccatgacatttcggaaatatggagaagtccgtcaacaccgcccaagtcaataaatgctccgaaatctgttacatttttaacagttccttctactgtatcgccgatctgaagcttttcaaacagttctttctgtttctctgctctcgcagccacaagcagctgtcttctgtctccgatcactctgtttcttctcggattgaactcgctgatcacaaactcgatctcctgatcctggtatttgctcagatctttctcataagtgtccgacacaaggcttgcagggatgaaaactctagcctcttcgatcacaacacttaaaccgccgccgaggatctgtgccacaggtgccttcagcacttccttattttcataggcttctttcagtctctcattgcccttttcagctgccagtctcttatatgtcaataacacctgaccttcgccgtcgtttacttttaagactttggcagtcatctcgtcgccgacagaaaccatggtagtaagatcaacattcggttcattcgtatattcacttcttgtaatgataccatccgccttgtaacctatattcaagatgatttcatccggctttacgtcaatgacagtaccatctaccacctcaccgtttctgattgtcttaaaagactcttctaacatttgttcaaaagttaattccgacattattttgaacctcctcaattattttgttgggcgtggatgcccctgctgtaatacctactgtttccacggaccttaattgattcatatccaaatcgtcaagtgtctgtatatagtacgtatccttacatgcatcgctgcagatttcaaatagcttctgggtattggaactgcgcctgtcgccgatgacaagcatcgcctctactctgtctgcaatgtccctggcctcttcctgccgctctttggttgcattgcaaatcgtatttaaaacaattatatcataccccttttttacgataatttcaactaaatctttgaatttattgtaattaaatgtcgtctgtgacaccacgcatatccggcattctttgtcttctatacaaaactgctctgcttcttctgcattctggacgactgtgaccttgtctcctgcccatccttttatgccttccacctcggggtgcgcgctgtttcctatgatgataatatgagcacccttcctgctttcttccattacgatattatggatttttttcacaaacggacaggtcgcatccacataaccgatcccttttttgtcaagcctgtcacagaccgacctgggcactccgtgggaacggataatgacggtcccgtctttgagaccatccagttcttcctccgtctccagcacttcaacgccgtgcagcttcatatcttttatgacttcttcattgtgaataatggggccgtaagtatatattttctcaccttcatgcagccgtatctgttcatacacagtttcaaccgcccgcttaacgccgaaacaaaatccggctgtcttcgcaagttcaatcttcatatagttctcctcatctcctatgagcacaggcgcacgatcgcatccacgacttcttcgatcgacatgttggaactgtcgatgagaaccgcatcctccgcctgcttaagaggcgcggtctcacgtgttgtgtcacgcaggtctctcgcctcgatatccgctgctatctcctcgagccggcaggcggtccccttctctttcagctcttcatagcggcgtcttgctctcgtatctacgcttgccgtcaaaaacaccttcagatccgcatccggcagcacgcaagtgccgatatccctgccgtccatgatcacgttctgatcttctgccagactgcgctgcagttccagaagtttcgcgcgcacttccggtattgccgagcttactgaggccatattgccggcctcctccgtgcgtagttttgacgttatattcttaccgtttaagtatacctgctggacgccattctcatagcggatggtcacatccgcgtcctcacaggcccgcactatcttttctctgtcatcagggacgatccctctgtccagaaaatggaccgccagcccccggtacatcgctccggtatctacgtaaatgaatcctttcttatttgcaacgagctttgctatcgtgcttttccctgcgcctgccggcccgtcgatcgctattttatatcccatttttcttcctcacttgtctttgttcttctgtcatgtcaaacaattccagctcccgcggcatgaccggtagaccaggcgatctgcaggttaaaccctccggtcagcgcgtcaaggtcaagtacctccccgcagaagcatatccctttcacaagcttcgactccatcgtaccggggtcaacctcctttacgctgacgccgccccgcgttatgatcgcctcgcggtaatccctgagtccggtcagcgtgacaggcagatgctttatgagccccgcaaactgccggcgctcttcttttgtgatggtattgaccttcttttcagcatcaatactgcttaattttatcatgaccgggacaagttttgcggggaataatctcccaaccgcatttttaaactgccggttgcggttctcttcaaaatcccggagtacgcgctgatcgagctgttcttccgacagcgccggcttcaggtcgatcagcagctgcaattccttttgtttcagcttctttcccacatagctgctggcggtgagcatgagcggtccgctcaccccataatgtgtgaacagcatttccccgaaatcctcatacagcttcttcctgccgtcataaaccgccgcgcggacatttcgcagcgacagtccctgaagctccttcacccattcttctttacattccatcgggacaagtgacggcatacactctgtcactgtatgcccgaggttttctgcaaaacccagtccgtccccggtggaaccggtagcctggtacgacaggcctcctgtcgcaacgatacacacatctcccgggacctcacgcccgccgtcggtaacgatcttctcaaaccgtccatcggctgctttgatctgtctgacagctgtactgagatggatgtggacgccgagacgctccatttcacgctccagtccgcggatcacatccgacgaatgatcggaagccggaaatactctgtctccccgctccacttttgtcttcacgccaattctctcaaaaaaggaaatgacatcctcatttgtgaaactgtaaaaactgctgtataaaaacttggaattacttaccactgcgtcgaacagcccttccatatcacaggcatttgtgatattacatcttcccttgcctgttatgaacagctttcttccaagtctgtcatttttttcatatatgtggacttcatgtccattttcagcggctgcggccgccgcgcacattcccgccgcgcctccgcccgctatcagtactttgctcatttttattccttgcccgtttcttcggaaccgctaagctccatcttgttgtttaccatgttcagctcgtctttgctgtatacctggtactcgtcccatattttctcaagtgtctcaagtgtcgttatcacctcgtcctgcttcttcatacagagcgcgacaacaagcgcgttgacaacgctgagcggtgcaacaagcgagtctacgatggaagccatatcacttctggctatcagattgcaggaggaatacagattcatcggtgaatggatactgtccgttaatgtgatcaccttcgccttgcggttgctcgcaaactccagcgcttttaatgtgcgcatggaataacgcggaaagctgatccctatgatgacatcttcctcgctgatacggatgagctgctcaaatatctcgctggaactgttcgtattcaccgcttttacgtccggacatatgagattcaggtaaaaactaaggaagctggcaagcggagcgcagctgcgtatgccgatcacatagatacgccttgcgttcaatatggtatctaccgccatctcaaaagtctcgtgatcgatagaacccatggtcagcttgatcttctctatatcagactgaagcacagtattcaggatctctccctggctgatccttccataagtcacttccatccgctgtattgagttaagcttcgtgcgcacaagttccccgagcgccttctgaaagcccggatagccgtcatatccgagcgctgtggcaaatctgacgaccgtggattcactgacccccacctcttcgcccatcctggcggcagtcagaaacgcagccttatcatagtcttcgcggataaattcggccagctttttctgccctttgctgaattttgcatacttttcatctattttctgcagtaactcatttttgcttcccatatcccataatcctctttttcaatatttcgcaacatctaattatataccagattcttttattcttcaatatgaaaatgccccgtcctcttccgtcattcttgacggacaaggccggggctgcgcctttccaggctcttatacaggataacttccgttctccgtgtctgccattgtctgatcaacttttgtctgctgcgcttctctgtatttaaagaagtctgtagctacctgcgggaacagagcatatgtcagaacgtcctcatcctgctggctccactgtgccatctcactgcgcagcgtgtcaagttcatccggaatcaggtcagccggacggcaggtgatgatctcggcgtcgtcgccaagaactttctttctcacatcttcattgaacggcttcacggtagcaccgtactttccgctcagcacatctttcgtctcttttgtagccattttataacgctcacccatcagcacgttgaacacagcctgcgtgccgacgatctgtgaagaaggtgttacaagcggaggttcgcccagatctttgcgcactctcggaacctcttccagaacatcgtagtatttgtcttctgctccctgctctttcaactgtgaagtcaggttggaaagcatgcctcctggcacctgatacagcagtgtcttgatattgacacccatgtttttcggattgagcagaccgctggcgagtgcttcgtcacggatcggacggaagtaatccgcgatctccgcaagaagattctggtcaaatcccgtgtcatacggcgtgcctttaaaggtttccaccataacctccgtcgccggctgggatgtgccgagcgcaaacggtgacattgcagtatcgatcacgtcaacgccggcctcgactgccttcagatatgtcatggacgcaacaccggatgtgtagtgcgtgtgcagctggatcggaaggtccaccgcttctttgagcgctccgataagctctgtcgccttatacggaacgaggagtcccgccatatccttgatacagatcgaattggctcccatttcttcgattctttttgctatgtccacccagtattctaacgtataggcatctccgagcgtataagagagagctacctgcgcttctgccttctccttattggcggccgtaacagctgtctgaaggttgcgaaggtcattcagacagtcaaagatacggatgatgtcgattccgttggagacagatttctgaacgaaatattccacaacatcgtcagcatacgggcggtatccgagaatattctgtccgcggaacagcatctgaagctttgtatttttaaacccgtcgcggaacttgcgcagtctgtcccatggatcttccttcaggaaacgcagggatgcgtcgaatgtggcgccgccccagcactccacggaatgatacccaaccttatccatcttgtctacgatcggaagcatctgttctgtcgtcatacgtgtagcgatcagtgactggtgcgcatcacgcagaatagtctcagttattttaattggtttcttttctatatctgccattctttcttcctccattttctacatatatcgctcttatgctacatgacaccgaagatcgccataaaggtgccggccgccaccgcggttccgataacacctgccacgtttggtcccatggcatgcatgagcaggaaattggtcggatctgcctctgcgccgaccttctgtgacactctggccgccataggtacggcggatacaccggcagaaccgatcagaggatttaccttgccgcgggtcgccagacacataagctttccaaacagtacccccgccgcagtcccgaacataaacgctacaaggccgagaactactatcttgatcgtatcccagttcagaaacgcctccgcgctcgtcgtcgcgcctaccgaagtgccgagcaggataactacgatatacatgagcgcattgctggctgtctcggacagctgtcttaccacacctgattcgcggaacaggttgccgagcatcagcatacctacaagcggtgccgtcgtaggaagaatagagcaaacgacgatcgtaacgatgatcgggaacaggatcctctccagtttggataccggtctcaactgttccatcttgatctttcgctctttctctgtcgtgagcagcttcatgatcggcggctgaatgatcggaacgagcgccatatacgaatatgccgcaaccgcgatcggtcccatgatcgccgtctgctgcagcttaccggcaaggaagatagacgtaggtccgtccgcgccgcctatgattgatacggccgcagcggctttatcagagaatcccagcgccatggctcccagataagcggtaaagataccgaactgagccgccgctccgaggaggaaactcttcggattggcaataagcggtccaaagtctgtcagtgcacctacaccaaggaaaatcagggaaggaaggatcgcccactcatccagcttatagaagtaatagagcagtccgcctgttccgttggccgcgtcctccgcatgcagcatgatatccggatagatattcacgagcagcataccgaaagcgataggtaccaagagcagaggttcaaacccatgtcgtattgctaagtataggaaagcacatgccacagcaatcatgatcacgttgccccatgtaaggctgaaaaaagctgtctgatgcacgaggtttcctaatgtcgttgttatataatccattttttaacctccagtcgtgtttcaaacataataacatttattatgtttcttagtttaatgtagccaataccgctccggcttctacagcatcaccgacagctgcgtcaatgcttgctacagttccgtcttccggtgctacgactggaatctccatcttcattgcctcgatgatgactactgcatcacctttctttacgctttgccctacgtttgcttcgatcttaaatacttttccggccgctcctgccttgacctggatggaaccggctcctgccgatgccgctttcggggctgccttcggagcggcaggtgccgcttttggtgccgcagcggccgcagccggtgccgcaggcgctgctcccgcgcctttttcttctactgtcacatcatatacattgccgtttactgtaattgtataatttttcatcttttatatcctccttgatttccctctgttaattccatttattcgatggccttcttcttatgcttctcacaacgaatccatcagttgtcgttccttcagccgccgcgaccgccgcggaaatgaccgccgccagctccatatcgtccgtctctgcggccgcgtccacaataacgggcgcgtcctccacagccgccggcgcttccgtggtcttctccggctttctgccgaacgcattctgcaatgccggaataaaacggaataaggatataatcagtgatatgaatataagtacgacaaacactgttcccattccaaggactgtattaagccctgctttttcgagaatttctcccatcgtatactttcccgcaacagtcatactgtccagattcagattgcctctcgtgtctgctttgaatacgaaagtgagatccgcattgcgcttttcaaactctgccgtagtcgtgatcttcaattctgttctggacggctcgtatttgtaatccccatggcccgcataatcgccgcactcttcgattcctgccttccaggcatccatcgcgctcagaaagctgtcgggagtaaacggaagacccgcgctcacaaactgctgctccattgcaaactcagacattccattccactgctctgtcgtctcttcgtctgcatttgcacaataatctatgagaaaatctgtcacctgttccatactggctttgtcatactcgacatcggaattctgcttgctcccgcacccggtaaagcagaggacagccgccagcatacagagtaataagctaatttttttcttcactttgctccacctctctaaaccgttccgtgctttttcaccgggcggtcttctctctttgtgaataacatctccaatgctccgattacatatttcctcgtgtcggccggcgcgatgatcgtatccacatatccccgtctcgccgcagcaagcgggcttgactggatctctttatattcggaagccttctcttttatcacgtctgcgtctgcgcctgcgtacatgatctttgccgcgagagaggcatccatcattccgatctcggcatcctgccaagcatataccatatcagcgccgagcgctttgctgttcattgtcacatatgcactcccgtatgctttgccgataataacatttactttcggcacagtggcgtccgcaaatgcatacgtaagccttgcggcttctcttgcgaggttcttctccgcacactcgctcgcctcaaacccggatacattcgtcaatgtaaggaccggtatgttaaaagcgtcgcagaatttcacgaactccgccgcctttcctgctcctcccgccgacagggagccgtcaaactcatctgtcacttctgcgtccgcattataaactttggaacgatttgccacagcgcctaccgtcattccgttcagacggatgaatccggtgaccatatcttttgcgtaatgtttcttcgtctcaaaaaagatattgctgtcggaaatctgggcgagggctatcgccgtatcttccgcagcgttttcaatgcctgtgcaggcgcggttcaagtcgtccgcacattcatcatacgacgcgtcttcttcattattgcatggcagcatacatacgagagaacggatgctgccgagtatctcttcctctgttccgatatcatcgacaagtcctgccttttcactctggaactgtgctgatgatgtatcgcatttagatatttcattccctggaattgcatttggagaattgatgaataatttaccgctcttaccttccatgaacgtaaagtcggtaagcgcaggaacaacagccagccccccgccgcatgtcccgaaaacagctgtgatctggggaattacgcctgatgccatcgtctgcttcagatacagattcccaaatgcctccagtgcatctgttgcctcctgaagtctgagtcctgcacagtccacaagaccgatgaccggtgcgcccatcttcattgccatatcatagatgttcgcgatcttctttgcatgcatctcaccgatcgccccgtttaacacagaagcatcctggctgtatacatacaccagattcccgtcgatcactccatacccggttatgacaccgtccgccggagtttctttttcctgcatgttgaaatctgtagttctggccgtcacagccccacctatttcaacaaagcttcctgcatcgagcaaagcttctatgcgattgcccgctgcacttcctgttgccatgttgtccatagtctagccctccattttcttacatattctaaatcaggtcctttagcatgaaaaatctaaaagtaaaaccaaatttttgccaattatattgtataatattgaattgaaaatagcaatcctttttgttataaaattgacatttttttcacatactgaacccgcctataattctgttgttttgtcaagtatctgatgataaaaggcatcctggctctcttcccgccggatcgtatctacaatctcaccgtctttgagcaggataattcttttacagtagctggccagacgggaatcgtgtgtcaccatcacaacagtcttgccaagctcctcatttattctgcagagtgcttctatgacgacctgccctgatctggaatccaggttccctgtcggttcatctgccaaaacgatctccggatcgttgatgagcgcccggcagatggccgctctctgcttctcccctccagacagttcatacggcgccttgtacagtaattcaccgatgccgaactgctttgccagctcttctgtcttttctttcatcacttcaggttctgctttgtccaggatcatcggcagcttgatattgtccatcacagacagactgtccatcagatagaagtcctggaacacaaaaccgatctgacgtcttcttatatctgccagttcatccttccacagttcttccgtatccatccccttaaagatgaccgatccccccgttggtctttccagcattccaagaagcttgagaaatgtcgtcttgccgcagccggatttccccatgattccgacaaactctccctgttccaccgcaaaatcgatccctttcagaacatggatctcatttatctctacactctttcttgtctccaccttataattgtgaactaattccttcgtctctatgatcttttcactcatttacacttcctgcctccctacatttatcctgctttttctgatcctgcgcttcatctggaatacaagccacgccatccaggccgtctgaatgacgagatagacggcagccatcgtccctcctgtcttcatgtaatccatgatctgtgaggaaccgtatgtcctaagccggaacacagaatacgtaaatatggccgccgtcacagtgcttatgaaaaggggcactgctgcaaagggccacatttcttttttgatcgtcttcatctgttcccgctcgtgcatgcccatgctgtcataaaacccataccggcggcaaatatcgtccgcttcaaacgagaacttgatataagtcagaaagcaggcacatgcggcgagcatcaggatgacaaacgcatagactacctcttttgtatagcgctcggagacaatgtccctgaccgtctgccgactcccgtaaaatacgcggatatcatagtcataggattcatcgccgatatgctgttcacggagcgtctccagttcccggtccacatccttgtaatgttcttctggtacatttatcagacagagatttttgataccttcctctgttttggcatatgcgccgttaaaataatcgtcggaaaatacgaccagattttcctgggatccccgctgcagcattccggtcagaatctggcactcgtaatcttttaccttccactgcttatactcaccctctccgtccggctgtccaagcttcagatacgggttcgcaagctctgccccggccgatacatcgatgggccgtactttaaaagagctgtcctgctgaaatacaagataaatttcgtcgtcttttaaaccaagcgccggcggctcaggcagcctacgcgcctcatagagctttcggtacgttgactcagaaatgcctgcgttctgccccggcggggcaaacataatgagcgacgccataaaatcaaaggagttgcctgtcggcgacgtgacccgaagcatagggacgatatccgctctggcgtcgtatttctgctctatatcagctaccgtatcctcatccccctcatgcatcatcagtacaaaatcatacggacaaagcttttcagccggctctgcgatcagattgccgcaaagctgtatgagaaatactccaagcgcaaggagatggaccgcagtgagcatgacgagatatctgcagtttttcttaaaacggtaatagaaagggattttttccagtaagtgccggtagtaatacctgtccgacttatcgatacacttcatgagaaacgccttcccgtaagatatcacaaggtacaggcccaatataaaactgatcaccgtccacatactcgtatcggaatagtcaaagatgctggaccggatgaactcaagtcccagcagagcggcaggaataagaaatcttccgggaatcttttcactgaccacgtccttcacagccgcaaaagaatctctcacccggagataagactcgtaattgatggcagtggctatcataagtacaatgatatagccggccagggcaaacagaaagatgacaggactgatatctgatacggtcacatccggtcccagtttttttataagaaggtgcctcatatacagcagtatccctgtgccggcggccactcccgcgatgaaagaaatgagaaggcttcccgcatattctgccgccatgatgacggacaaagtcctgctccggattccgaggaccgtaaacatccggtaatcagacatcctgcttttgatatagtaagaaaacacaaatgctgtgagaaatatggtaagaaacaggataaggccggcagcccggatcaggatctgctgcaggcctgtcccgagaacgatgtcctctacagaatgaacgctgtgaaggatatagttcatccctatcgccgcggtcagaaacgcggcggaaagcacgccgcttaagataaaaagcacgtaatttttccatctgtatttgaaattgtcccagataacagcatagaattcccggggatatctgcctggaaagtgaagacggcgtatccgttcctcccgctccctgcgttctctttttttcataaggcggtaattttcattgatctccttactctgctccagatacagcacaacaagaaactctatccctatgacggccacaaacgcaaaaagagccggacctgcgtcatatcccccgaatatcgtatacccggtaaaataaataaatgtacatgcgtacattcccgcatttaaaattctgtttcttctgctgcaaaggagaagcacttcgtggaccacagcaagaagaaccgctgcaagcgccagataagacactgcgtaagacgcgtatatatttccgccgtccggggcatactctgcaattccccccgcggcataaacagccttaaagaacccgtacaatgtatattctttcactcccacatcggcccatggcagcaaaaaggcgcctgtcaccgcaagaagacaagcgatgaaggaaaaccattttccctcaattttttcccgttgttttttcatgcagaccttccccccgttttattattgagcatgctttctataagcacactctactcctaattccccctttttacaagtctgccctatgcacttttcttattcacaacgtttgtcgggacggcagctgcagccgcccgtccgggcggacccgctttggtcacagcccggcggtattctcaagtatttcctcataaaatccgcctgctgtcccccgggccagctccctgatgagcagcccgtccttcagcagcagcaccttcttgcaccggcaggcgatcttcggatcgtgggtcacgatgatcaccgtcttgtgccactcctcgttcagtctccggaaccactgtatcacctcctcgcccatggcggaatccagattgccggtaggctcgtcggccagtatcagatccggatcattcatgagggcgcggcagagcgcggctctctgcctctctccgccggacatctgatacggatacttcttcgtaagatggctgatcccaaactgcgccgtcagccgctccatcttctctttcctccgcccaggctccattttatccagaatagccggcagcattatattctcttccactgtcaggctgtccatgagattgtagtcctgaaatacaaagcccatgccctttctccggatgtctgagagttcctcctcccacagtgtggcggtctcccgcccttttacatagagcttcccctctgtgggctcatccatcagaccgaggattttcagcaatgttgttttcccgcatccggagcggcccatcactgcaatgaattcttcctcctccacgcagagactgattcctttgagcaccggtccctgctctgtgttgtatgtttttaccagttcttctgcctttaagatcgtactcatgattacctcctctgtcgccttctgcccccgaggacagcgcggatataacaggtcccaagtattgccgtgacgactgcataaagcaacgtataacacaaaaacaagatacacaggcacttcacatatactgccagctcccatgccgtatacatcctttttaccgccacagcgcatataaacgaaatggacagcagggccgcaggaacataactgccccacacgatctttgccatctcccgtccgagaagacggcgccgctctttctcaggcatgccgatacttttaagctgggaaaacttcttcgccagctcttcctgctccagcccgtatttgataaaaaagataaagaaactgcctgtcagaagtccggcaagcaccgccaggcaggcagccttcttaaagtgatgctctgccttcgtctcagcagcagccgtctgctttgcataatacggctgtatcctgtcatcccaggaagcgtcgcttttatgccgcttcgcatatgtctgtagtttttgttctataatttcatagtcgtcacggccgcattttataagcttcagccgggtggggccttcctttcctcctccaccgcggaagaacccgtcaaatacgtggtcggaaagcaccacgatgttctcctgctgtccctgctgaaacattcctgtcaggatgctgcgttcactgctcttcataacatactgagggaacagggtctctctctccataaaatcataactcctcaccggctgtccgatgcggaatctcggctccctgtcacctatgtaccattccagcggatggctcttaacggaagtatcctgctggaacactacatggacctcgttcgcctccagttccagacttttttctgccggctctcccacggctcttttcagttcccggtaacacgtctccggcaccgcgatatgctggccctggggccaaagaactcccatatactggttggcggcagcctgcttccatgtatatggcgcgccgaggggcgtcgtacacctgagcatcggccacgtgtggatttcaacgccacaggtagcggaaaggtctgaaaaatagtcctcatcctcttcataggacatacagacaaagtcatacgggtagaggccggccgcgctgccggccgcttccactgcggcatattccggaatgtagatcataccggaaagcagatgaagcgcaaaaagcagataccagaacctgtaatttgtcttaaaccggtaccgccacggcaggatggaaagcagtctttccccttgtgtttccgaccgtctgctgttgtatgcagctgtcctggcatgcaggaaataaaacagcacaaaggagccgatgagcatccatatattagcagagaacttctctgcctccggcggaagccagtatcgtaccgccgccgacacagtgactgccgtgcctgccgcaatgcccggtacgagaaaccgatgcggcattttctccgcctcctgtcttcttgtggagagcttaaacaagctttcgtgcccgaacaaatgataattaatgagagaggacactaaaacggccgccccatagatacccgctgttgcggccgctgtcttccatccgcctgcagaccatgatctgctcccggtgatatctgcaagcaatgtctttccggccagaaagagtaccgaggcggccaggaacagccccgcaaaataagcgaacagcagacagactgtatattccagagcaattatgagtctcagcgtattctttcttataccaaggctgtaaaaaatgctgtagttgtgcattcgtgtcctgaggtaatgtgtgatgatcagcgccagtatcaggacggaaatacatgccgcaaccggaaggatctcccccagtatacgctgcatgccattgccgtagcctgtgccgatgccggcgccgcccgccttaagtccgtactgaactccaagcagagtgtgaagtatcgtaacgacgcctcctgcacctaatataaacagaaaataactcttccggttatggacaaaatttctccagacgacgtgatagaagccccggtcataccttccggggaaatgttttctacgctttttttcttccttcttctcttgttcttccctcttaagcgcctctgcctcatcccggatctgttttctctgttccaggtatacatgccccagactgtcgatcccgacagcgataacagagacgataagtccgtcgtccggcaaatacccgccgaatgtcaccagcacgagaaataccgtcagtgtcatgccatagatgatatatctcagaaaccgcggatttttgccaaacagaagcagcacgatccttagaatacttaaggcagctgccgccgcggccacatacagaagaaaataagacggcagaaactgagcatatgcactgtcttttgtcaccgcttcacgtgcagtcaccgtcacccggctgaaatattccggcagtcctccgctggcatacaccgctttcagaaacaggggcagtgtatacctctttcccgcaaaagtcagccatttcaaacataagacagaagccacaaaaacaaccgacgttccgatgccgaggagccggccttcactgcgcagtccgcacttttttttgctgtttttactcctgttgccgttctcttttttcattgccttccctccctcatcacaagactaaagacccaggctgcagcttagatcagcggcagtacaaaagttatatgcccgcagccagaattgccatacctacaataccgacgatcacaaagcacgcaattttaagcaggatcgaagccgctgtcatcatctgggatacaaaggtctctttgtttttcctgtcttttgtaaggaagacggcttccgatacgagaaacatgatcaggaccacgggcagcaaaggaccgtaggaaaacatatattccagcacaagtccttccagcaccattttccatatatatacagccgtaaggacgatacatagaatattcaaaacgacatccacacaggctgctttaacgagtatatctctttttgctttttgttcgatatgctttttcccttcttccagcaacttctcttctcttaggttctgcgcgatgaagtcgtctgcgaattctattgtctgctccatcatctctttctgttttctgcatgcggcgcactgctccagatgttcctccacaagttccctgctctctgcgctgcaggcattgtccagataaagcggcagcagatcttgtattatgttacagtttgtcattctcgtctcctcctaacctttcctgaatcatacactttgccctgtaacaggtgactctcgcccacgactccgactttttgaacagccgcccgatatcgcggtaggacagttcgcccatcacccgcagcgtaaacacttccttgtacggttccgcaagaccgtgcaggatctcatggatccgccttctctggtctgcgtcgaccaccgctgcctccacattgtcacagctcctatacgcctccagactctcctccggttcctgcggcctgttttttctgcgccacgcataataggaatgcttcgcgatctggcagagccagaccgatatcttgcatgtccctcggaactggtccagatgttcaaatgcaagaaaaaacgtctcctgtgtcagttcttccgcaatatccggactgccgctcagcttcagcagaaagcagtatacacttttaagatttcttttgtagatttcttcaaattcatccatctgctctgtctcctcatacataagagtacgcaatccagattttgttacaaatttttttctgaattaatttttagaatatattatggactaaagtatagcacagaccgtcacaaatgactcgttaatcatttgacaattgactttatcccgctaattcagcgccagatcaccttatcaaaacaccagtaaattcctaaaatatttattaactttttcttaaaaacgagttgtactatagtctgatttgtgctattatctatctcgataaagttttaaatattgctggggggtccagatatttaaaaccaaaaatatatcctaacattgggaggtaatagtatggaaacagcagtaaagaaacgcagaccgtttggcttctatgtttgtgctctcggatttacattcgagcgtctggcattctacacagtgaaatatctgttagccatctggattgcaactaaggctgccaacggtggacttggtcttaccgatgtacagggcgctgccatgtctgcttctttcgtagcatggacgtatatcacgcctatgttcggcggatacatagcggaccactggttaagcccgagaatttgtgtagctgcaggtatgattttgatggggatcggctacctgtgtacatggcaggctcactcaatgggacttgtatgggcaatgatcgttcttgtatcagttggtacaggtctgttcaaaggaaacttgtctggtgtaaacggactgttattccacgatcaggatgaattgaactcagctttctcaattcagtattccttcgtaaatatcggttcctttatcggtacgactttccttgccatcacagcgacaacaggacttggcggacttaagttaagcttcaacacagtattcttagtttgtgcgatcttcttattcatcgacgctgcatggttcatctttaacggcagagctctcggcgacgccggcaagaaaccattcaagcatgatcagagagaattcgtagctaaggaaaagaaagaagctgaggtatctaagcctctgacatcaggcgattggaaacgtatcatcgccgttgttcttgtaacgctgttctctgccgttttctggatggtatggtacatggcttacatgcctgcgtactactatttcggttacggtgacggagcttccttcctgaaccacgcaaactggtatatcggaagcttccagattcctacttcatggtttgactctatcaatgctctcgtatgtattatcttaggacctgcgctcgctgtgctttgggctaagatggcaaaacgtccgaagggtgatatgagtatgttcaaaaagacagcccttggtactatgctcgttggtgtatcctatatcgttatggttatcgctgatgttgtcagaggcgagggacaggcatctatcttctggctggcgcttgtttgtctgctcatgtcagtcggagagatggtattctcccctctgggaaattcctttatctccaagatcgcccctgccaaggtacttggtctgttgttaggcttctggcctatcgcggtattcatcgctcagcaggtttacccgaaggtatacgcttggcttaagacaattgaattcacaaaaggttacggcggacttgcaattgtcgtaatcgcacttggtcttatcctctggatcttcagcggtaaacttgataaactggaagaagctgaataatcaactgaatatggaataaagcagaacccatgccgggaatccggtttatgggttctgtttttatacttcagtttgtactttagtctgttttgtggtacatttatactataagaaaaagttattttcaaggaggtatacataatgaacgtatcagaaagaatttccagacttcgtgctctgatggcggaaaagaaaatcgacgcatatgtcgttccaaccgcagatttccaccagagcgaatatgtcggggaacattttaaagcaaggaagtttattaccggtttcagcggctcctacggcaccgctgtcatcaccatggacgatgccggtctctggactgacggcagatacttcttccaggccacaaatcaattaaaaggcagcggcgtccgtctgatgaagatgtttgtcggcgatactccgacagttacagaatatctggcagatgtgataccggaaaacggaacggttgcctttgacggacgtgtattatctatggaggaaggccaggagtatgaagaagctctcgctcctaagcatatccatctgagctattccgaagacctgatcggccttgtctgggaagacaggccgcccctttccgataagcctgcctttttcctggaagaaaaatactccggcgaaagcgcagcctcaaagctctcgcgtgtgcgtgacgtcatgaaggaaaacaaagcgaccgtacatgccatcgcgtcactggatgacgtgtgctggcttctgaacctgcgcggtgatgatatcgacttcttcccgctccttctctcctatgccattgtcaggatggacggtgttgacctgtatgtggacggccgtaagttggacgctcgcattcatgaagagttggctaaagtgaatgtaagtatccatccgtataatgacatataccgtgatataaagtctctcgatgcatctgagacgatcttgatcgacccgatgaaaatgaattatgctcttttcaagaacatttcatgcagtattgtgaccgcgtccaatcctacgattcttatgaaggccatgaagaacccggtggaacttgaaaatatcaaggccgcacatatcaaagacggcgtggccgtcacaaagttcatgcactgggtgaagacgcgctacgacaaagagccgatcacagaactcagttcagctgcaaagctgacggaattccgttccgaacaggaaggttacataagggacagctttgaaccgctctgcgcctatgcggaccacgctgccatgatgcactactctccgtgcgaggagacagacgtggaactgaaagaaggcgcattattcttaaacgatacgggcggcggttattacgaaggctccactgatataacgagaacctttgtccttggctctgttgacgggcagatgaaaaaatactttaccgcagtcgtacgtgccatgatgaatctctcccgcgcaaagttcctgtatggatgctacggatataaccttgatgtgctggccagaggccctatctgggatctggacctggatttccagtgcggtaccggacacggcgtcggataccttgccaacgtccatgagccgccgacaggcttccgctggtatgttgttccgagtaaaaacgagcaccataagctggaagaaggcatggtgatcacggatgaaccgggtatctatgaggacggacagtttgggatccgtattgaaaatgaatttatcgtgcgcaagggtgttgagaacaagtacggtcagttcatgcattttgagactatcacctttgctccgatagatttagacggaatcgatccggaagagatgagccggtcagagcgggaatggctgaacaattaccataaagatgtttatgaaaaaataggacctcacctgaacgacgaagagcgggaatggctgaaagaatatacacgtgaagtataagattgacaggagccggtattgttatagtccaggctctaaaaggaggtataaacaatgattatcgcagcaaaatatctgatgacgggcgacggaaaaactgttctggaagatcacgcagtgctcacaggcagcgacggaaaaatcaaaaaactcgggatgaagaaaacgcttttaaatgagttcccggaggaggaattcaaggactacggcgacgccactcttctccccggcctttttgacatgcacgttcatcttgcctactggtattcccagccggacagtttcaattacgggcctcagcttgtcatgctctacgctctgcagcatgcgcagtccgcgtttgaaaggggcattacttctgtccgtgacatgtcttctgcccacggcgtatgcaaaactctgaagctcgcggcagaaaaaggatttgtcaccgtgccccatatcacccacacagataccggcatgtgtatgtccggcggacacggatgggaagaagttgagcaggtcgacggtccatgggaaatccgcaaagagatccgcaggcaggtacgggacggtgccgagtgggtaaaaatattgacgactcaccgctcccacactccggaattcacccaggaggaattagatgccgctgtcgatgaatgccacagacgcggaatcaaatgtggtgttcatgcaggaacaaacccgggcatacagatgtgtattgacgccggctttgatacgatcgaacacgccacgttcatgacgctggaccacgcaaagcagatggcggaaaaaggcatcgcatggacaccgactatcatggcgtatacgctgctttatgatatctgtaaagaaaaccttgaaaagaatgcaaatgctccggtaaacgaccctgttatgcagaaagaaatgaaagactaccagtattttgaacctgcatacaaggcatataaagaacactttaaagagctttatgataccggcgtcacggtgatcgcagggacggatatggttatgtaccagtcccctcttctccctcttccgcgagagctgcagtatatggtagaatacggtatcacaccggcgcaggccatccagacagcaacctcaaatccagcgaaggtactcggcgtggagaaagagcggggactcgtaaaagaaggcctggatgcggacctgctcgtcgtgggaggtgacttaagtaaagatatcacatgtctgaatgatgtaaaactcgtcacactcggcggcagaaaagtatttgaaaatgggatccgttatgtggggacgaacaatatgtttatgtaaatggatgggggttgttatggaatttggtggattgtggcgtacggcgaaggaaaggcggcagggtgctgcggaccggtctgtgcgcttgcaatccgtaagagaaacgaacaaggtatagccggacaccgacagatgcgataggaaatctggatgatttcctatcttagctgtctcagaaactgcacttgtagtgcagtttctggtctgtctataccttgttcgtttctctaacggcttgacaaagctccctccaacggcccgcagcaccctgccgcctttccttcgcctgttaccccgcaaagttctaaattacttaatgtgggcccccctggagccagtcttaatggatttaaactgtagataggtttatccattgtgacagcctgggaatctcatgttgagaaggtttagattccttgtgatggaacaggcagggggaacgggtgtgcaggactgtggaagggcgttcggaggcagacgtggaagccgttgctttaaaacgagccggaagcagacacgggaatgttatcacaaataacattcccgtgtctgcttccggctcgttttacagttacggcttcccggctgccggagcgctctttcacagtcctgcgcacccgccccctctgccgtccaccgccaatcttcctaaacatccccaacaaactcccaatcacttctggtttcggaattgtattggtgttatattgtatgcctttttaaaaagccggttgaaatgttctacattctggtatcctacggacagggctatgttttctactgtcatattgctgctcttaagtagtgctctcgcctttttcatgcggatcttctttacgagatccccgaacgtcattccagatttttccttaatgtatttggagaggtacggctttgacaggaagaacttttcagacagatcatccagtgttatatctatatagtttgcctgaatatagttcaagatctcgatcatcctcgcatctttacacgtatctgagcttccgatcgcctctatcttattgactgccacagtgagcgcctctatggaagcgctgatgatatccgcgtcaatgcctacgccccagagtgcttttccgttgcagataatgcctacatatgccaccgccttggaggaggagccttttgtgagagaatgctcttcatagaatgtaagctcataactgatgttgaaatactgcttgatcgcattgctcactgcatcgagacgtccatttcccatggctgtgatcacacggctctcgccgttgtgattgatagttgtctctgcggtgatcccgtctacctgtttaaaatgacactcatcaatatgaaacactggttttgtatttacatagttgtctgagaatatctgatatacccagtccggcgtcagctctttatgtgccttgtcggaaacatccttcacaagatatccgacttcttctctcatcttttccggaaggttgatgccataactctgcttcagaatgtaatttacgccgccttttccggactggctgttgatcctgatgacatccgaatcgtatcttctcccgacatcctgcgggtcgatcgggaggtacggaacagtccattttccgctctttccgtcatctttccaggccattcccttggcgatcgcatcctgatgagaaccggaaaacgcggtgaagacaagatcgccggcataaggctgacgctcataaacgcgcattctcgtaagctgctcatatttctcacgtatttcccccatattggaaaagtcaaggccagggtccacaccgtgggagtacatgttcatagccagagtgatgatatctacatttccggtgcgctcgccgttgccaaacagtgttccctctattctgtcagctccggccagcattcccatttccgcggtcgcgacaccgcttccacggtcgttgtgcgggtggaggcagagaatcacattatcgcggtaattcagatgcttgtgtacgtattccagctggcaggcgaacacatgcggcatcgcgttctccactgtagtcggtatgttgatgatagccttgttgtccgcagtcggcttccacacatccagcacagcattacacacatctaccgcataatccacttctgtccccgggaaactctcgggactgtactggaatgtaaagtttccttccgtctcgtcggccagttctttcagcagttttgcgccgtccacggcaatcttctttatctgctctctgcttttcttaaagacctgttctctctgagccactgatgttgaattgtacaggtggatcaccgcatggggcgctccctttaccgcttcaaaggttttctttatgatatgctctcttgcctgggtgagcacctgcaccgtcacatcgtccggtatcatgtctttctcgatcaacgtcctcataaactggtattccgtctctgaggcagccggaaatccgacttctatctctttaaaacctatgtccacgagcatctggaaaaactccagtttttcctcaaggctcatcggctcgataagagcctggttcccatccctcaaatcaacgctgcaccagatgggcggacggtccacgtattcctttttcacccagtcgtatgtaacttccggcggcataaaatactgtctttcatacttttcaaaatttttcatcacatgctctccttttacctgttctatacattgataattatctgaattttctttcaatacactcatcttttcagataaacattaatcaactttattgtctttttttatacttctctatcctaacatatgcattcaaaaaaggaaagtgacaattttaatcactttccttgatgtttattattatatgaaactgtacaattatagaatttatatttaatttgcttccaatgaccgtttctttgtaattgtaactttttcctcataacatgtaaatatttcatcgacatgttctttcccaagttttggtgttactatgctcacaaccggcactattacaagtccagcgatcatggccgccgccccggcattgatcggcgatgctatatagtgcaggaacatattggatactgtgatacctacgcccgccgcaaaactggcccatacagccgctttcgtgacgcctctccagtacagtccgtacaggaaaggggcgagaaatgccccggcaagcgcaccccaggaaattcccataagctgggcgataaaggtcggcggatccagtgcgatcactacagataccgcgatgaagaagacaatgagcagctgcattgttctgacctgtttcttctcactcatatttttcatcacattatccttcagaaaatccagcgtcagcgtagaacttgatgtaagcacaagggatgccagcgttgacatggatgcggagagcacgaggacgacgacgacccctatgagcacatccggcagtgtggataacatatgcggtacaatactgtcaaaaactacatttccggtcttgtcatagatagcgcttccgtcaaacagccgtccaaatcctccgaggaaataacttccgccggccacaacacaagcaaataaggtagatattactgttccggtattgatcgctttctcgtctttgatagcgtagaattttccgatcatctgagggagtccccatgttcctagtgatgtcagaataacgactccaagcagatttatagggtccggaccaaagaacgacgtgaatgcccccggctgtcccatcgttaccggcacgtcacttggaatttctgccatcttgcggacagcctcaataaatccgccctgtccgctcaggactgccgcaatgaccgcagcaatgccgatcagcatgatgatcccctggatgaaatcgttgatggctgttgccatataaccgcctagtataacatagattccggtaaatacagccatgaccacgacacagtatgtatatggaatgttaaacgccatctcaaacaatctggacagaccgttgtatatcgaagccgtataaggaacgagaaagataaatacaatggcggacgctgctatcttcagcgctttactgctgtacctttccccgaaaaaatcaggcattgtcttagatttcagatgctggctcataactttcgtacgccggccgagcacgacccatgcgagaagactgccgatcagtgcattgccgatccctatccaggtggaggacaggccatatttccagccgaactgccccgcataacctacgaacacaaccgcagaaaaataagaagtaccataagcaaacgctgtgagccacggcccgacagaacgccctcccaacacaaatccgtctacactcgtcgcatgctttctcgaataaagccctacaactaccataactgcaaagaatacaataagcagcgtcaacttgatacccataatgttctcctcttctctcattttgtcgattatttcgctttaaaccgttacgctttaaagtattaaagtttttaagtctaaagtagaatatcatatacgaaagcctttgtcaataggggacaggttaaaatgaattggggacggggtttttctagaaaaaccccgtccccaattcattttaacctgtcccctattcatatctcaaaaaaagatgaagcatttctacttcatcttttctactctgtcctgtattgtcttattgaaattctcaaccttgcggctgtacacttctgtcatatattttgagttcatcatgaaatctgctgtcgccaggttgtttgctatcgggatatcgtacactacagcgatacgaagcagcgcctttacatccgggtcatgaggctgggcctcgagcggatcccacaggaatatcataaagtcgatctggccttccactatcttggcacctatctgctggtcgccccccagcggtccgctgttgtatccttttaccggcagtcctgtacgctccgcgataagtctcgctgtcgtgcctgtaccgcataaaaaatggttcttaagtacgtctttattcttatcgcaccagtccaccagctctttcttcttgccgtcatgagccaccaatgctatatgctttgcttttccgatctcaaatgttacgtaattttcttctaacatatattctccttcctgtctgttctgactagtcccactgttccatcgtctcaaatcttcccactgtcagtaatgcgatcaggactgtaatcatcatactataaatcagcataataggaaagacaaaattgtaatttatgagaaatcccatcagcgcggccagaccgatgcctgctcctaatataccgccctgcacggccattgcaaacagattttttcctgtgcttccgagtgtactgcccagaatgctctccccgagtatctttatatagaggcggtttgcctgcagcacacagtagataaggatacacattatgatctgatataccggaatatgccatgcgatccccacaggaacagccagtacaatgccgtccgcaagcgacttcacatgctccatcgctgtcgcataccagagcttcttcatcggtttgtccggtataaggtaaatatatgggttggcgagctctttgttccattttccgagatatcccgtggtaagaaatatcaaataagccattacgccgagcagcgacagtcccggcggtattttctccggcgtgtctatcacaaagacgcagatggcggcgcctattatgctgtacagcgtcattgcaccgaatataaaaaacttttcttttttatattccagcagctgccggtaaaaaatcgccttcgctcctgaaccttggtaatgcattcccgcctttttgaattttttcttcctgccgaccgagagaacgacctctccctttttgctgcggcttttcatctctgcataatcgtccgcaaacttggccgcgtcctcgtaataggcgccgctgcatttcatgcggaacgcggcaaaaaacatgcctgcgcagcttaaaaagaacagaacactgccaatgacatttacagtttcaggaccgagtatcacaagcctcacggacgccacacaccatcctgccacaggaacgagctgcagcgcgggaagattaaagatgtcctccgccgcagcagcggaaaatccgttcttttttatgaagagcagaacgatgaccgcgatgactcctatgagcacatatatactcttgcaaatgatcttcacaagcggttcaaacctcttttcttttgcatacagaaatatgatgagactcgcctcaaacactgtctcacatacaaacatcacaaaataaagcagaaaagctctccagacggacagatgaaatattgtgacacctgcaagcgctatcgccacatcgatcaccagattaataataaagttcttagcggcgccgtacaaaagaattttcttcgggctgacaggagccggaaagatataatgagaatgactcggcttaaaaatcacccctttaagctttgcatacgatataaaattggaacacacagcaatatacagccacaccgtaaggatgtaaaccagactgtttacagaatcaactccgccgctccttgcaaggatcccccagccgaccaggatcattacgatataagcgccgatcagtacaatgtaaatataggtgagcggcttcttcatcgctttcctgagacgattggaaaatgtgcgttttgtcaggtacattaaagcatccatcaccgcttccctcctgtcaattcaaagaacaggtcatccaggtcttttccgcccacttcttcctttgtgtaagaaccgatgatatggcttttctccatcacgaacataacatcccacaaatcttccaccatctcaagcatatgcgtgctgatcagcacggtcactccctgttcccgcagttcgagcacagtctctttcagttccttgatggccttcgggtccagacccaccataggttcatccagcagtatgaccttcggtttgatcgccagcgcacagcagatgctcactttctgcatcataccctttgacagttcgtttccaagcttatcctgcttatcctccatctcataacgccggagcatttcctcgatctccccgtccgttatcccgctgttgtaagcatgccggatatattcgatatgctcccggaccgtaagcgcctcaaacatgttcggtatctcaggcacataggcgaaacatctcttggcatcgagcgttttagcgggaatcccctgaatctgtatctctccattgtagcgcagaagtcccgctatacttttgatgatcgtagattttcccgcaccgtttggccccagaagaatacctacccggccgtccggcacgaaaaaactcacctggtccaccgccaggacttttccataagatttgctgagattctgtattgccaacataactttttcctcctgctgagcttgaatgtcgtttttctcttgtactattcatttaatacaatgatacattaaccgacacgccatgtcaagagaaactgcggcgataagcggcggcataaagcagaacagcctaaatttcaaacacttctttgtcgtcagggacgaaaagatttccatggtaatactgctttccttcctccgtatataacttcttccgcaccggcagatgtgtctcttctgtgtgatataatatgagattcataacgcccagcttctcagccagttcacacgcctctttcactgtactgtggtgcttctcataaggacggaacttgtcggcctcgctgtagagacagaaggcttcatgcatcagccagtcactctgtctgacatagcgttcctggcactcattgaacggctcgtctccgcagcaggttatcctgcgtccctctgccgtcaccatggaaaacccgaactgcttcgctttcgtggagcctatgtcaaaaaaagtgaccttttgtccgatgatctccctgctgtcgccatctttcacctctataaaacggatacgcccgcctatatgttttgtcaccttcttctgtatcgtaaggcctgcgatcgtcgtgatcttcccggcaagatcgctgtgacagtatatacgcagttctccttcataagtcccctggttcatcttctgccccgtcatccgtataatccagataaggccgagaagatggtctatatgctcatgcgtcaggaaaatatcgtgaatatcctccagccttatattcacatccttcaatattttcagtatctggttgccccctcctgcgtctacaagaaagtggcggtccccttcagacagaacaaagcacgtattgtaacactccgtcaccgccgcattgcctgttccaagtatcgtcagtttcatttatctctccccgctgttttcctcatagtgctttatcagtgtctgtgtcccgagactgccgtacccctcggcctccagctcctcataatttgccagcgcctgactgagcacttccagactgaggccgctcatatttgcttctgtcagcgcgatcttcatgtctttaataaaatgcttcaggaagaatccgggcgcaaagtcgccttccaggatcttcggaccaaacaggtcaagctgccggcttcccgcggctccggttgagacagactttaaaaccgtaggcagatcgagccccttcgcctttgcgtaagtcagcgcctcgcatacaccggacagcgttcccgctatcatgatctgattggccatcttgcagtgctgaccgcttcccggaccgccctggaaattgatattcgttcccatcgcttcaaacagcggcatacacgcttcatgatcttcctgcctgccgcccacgagaatggacagagtcccttctctcgcgccggtatctccgccggtcacaggcgcatccagcacgtggaagcctttttcggtcccctgttcatatatcttttctgcaagcatagggctcgttgtcgtcatatcgatgagatacgcccctttttctgcactgtccagtatattaccagcgtcgaaatagacttcttccacatcttcaggatagccgacgatcgtgatgactgcgtcacagctctttacgcagtctccgatcgtttcataaaagagggccccctcccggataacgtcctccaccttttccttcttccgcgcatagatgtgcagttcaaatcctgccttcatcagattgcgcaccatggatcttcccatgatcccaacgccgataaatcctatcttcctaatcattttccagtctcctttctctgctctttaagcgggcattatgcgcgccgcctttaatcttccactttttccaccacttcaccccggcacttatagatgcttccgcccggcacatatccccttacagaagacagcggatatatattagtatggcttcccaccacacttcccggatttaggactgtaccgcagccgacctcgacttcgtcgccgagcatggccccgaatttcttaagtccggtctcaatattttcttccggcgtcttgatgactacaagtttcttatcagactttacattggatgtgatggagccggctcccatatgggacttatagccgagaacagagtcgcctacataattataatgaggcacctgcaccttattaaacaatatgacattcttaagctctgtggaattgcctacgaccgcgccttccccgacaatggcattgccccggataaacgcgcagtgtctcacttccgcgttcttcccgataatggcaggcccgttgatataggcggactcgaatactttcgcagactttgcgatccatacattgtctccgactttgtcgtactcctctgacgaaagtgattctccaagcttctgtataaatcctcctattttcggaagaacttcccacggataagttactccgtcgaatatatctttcgctatagtttcctcgagcgtgtacatttcctttacagttaattccttcatagcattctccttttccgccggacctctgccggcttacattattcattatttattttgtcttatctttttcctttttataaaaacgggccgccctgtcataaaatgaccggagctggtactggttgttcaggcctttgactccgttcgtacggcttacgatgaaatggtccagctttgtcatatactcatccggcgtgatctctccgtctgccacatacgtaagccctttttcccagctggcggtaagctcgggattcaaaagtgacttaatggactgatccacaacatcgtagatcatctccccctgcagagtcggcgtcacgatctgggtttttttattcagagccagatatttgttgttgaagagcttctttaatatctctccccttgtggcgcttgttccgataccgcttccctttatctgggcccggagttcttcatcctctatgagctgtcccgcgttttccatcgccagaatgagagatcctgaattgtagcgtttcggaggagatgtcttcccttccttgatgtccagcgactgtaccggaaggaccatacctttcttaagaccctgtattttttcaaaaaaccggttgtccgtattctgtccgctgtctccgccgtcgctctcctctgcctcatttccgctgcttttcttctgtccgggaattcctgccactttcagatatccctcctccgccagcaccttaaagctggaaaagaagctttcttcctttatcttcgtgactattgtgaccttctgatagaccgcggggggataaaagatacttaagaatctcctgacgatcacatcatacactttcaccgacactgcgctcaggctcttgagagcacccagtccctgcccggtcggaatgatggcatagtgatccgtgatctgcttgtcattgacatatctcgtacgcgcgatctctttatggctcccgtatgagacgatctcgccgagaaagggaaccgccggttcatatttcatcagcccgttcagattcttatgtatttcctttgccacagcagtggacagcacacgggcatctgtacgggggtaggtgaccagctttttctcgtacatctcctgtacaagccggagcgtctcatccgggctgatcttaaacctctttgagcattcattctgaagctccgccaggttaaacagaagaggcgggttctttttctcctttttcctctctatggaaataatggtgcactgcactgggagcggatcacttagctccctgatgagcccggccgcgtcttcctcatggaggaatccattttctttatagagcttcggggactcaaaccatgcagatcctttcacggcgcgccattctccctcaaaggtctctcccggctcccctgccgcactgatgacccggtaaaacggcgtctctgtaaattcccgtatttcccgttcccttcgcactaccatgccgagcacgcatgtcatgacacgccctacggagatgaccgaatactttgtgtgcaggtagttggaaatgctgtttccgtactttaacgtcagcagcctggagaaattgatccccatcagatagtcttcttttgccctgagataggcggaggcagaaaggttgtcgtactcctttaagtcttttgcctcccggatcccgcgcaggatctcctcctcggtctgtgaatctatccacactctgcgccgtttttttccgtgtacgtctgccttctgttccacaagacggtatatatattctccttcccgccccgagtcagtacatacatagatcgtatccacgtcttcccggttcagaagccccgccacgatcctgtactgcttctccaccgaaggtatgacctcgtacttgaattcttccggtataaaaggcagagtctgaaggctccacctcttatacttctcatcatagctttccggataactcatagtcaccaggtgtccgacgcaccatgtcactatggagtcatccgactccagatagccgtctcttcgttttgttgtaagcttcagtgctttggcaaattcctgcgccacacttggtttctcagcaatataaagtgatttccccatatgaaatatctgtactcctttagttgtctactttccaaacagatgtctgatcctctccagaaaggtctgccgcctctccggcgcctttcgctttacattcagcgcctcctgcatgaacacggcctgagaatctatgagcggctctgtcggctcttttttttcatagtctccgtccgcgttcagcactcttgcttttacgttgtctgtcagcatgatcttcagataatggtttatctgccgcctgacatcctcatccagcaccggacaggccacctccacccgcttctctgtattccgcgtcatcatatccgcggacccgatatatattttctgctccgcgcctgttccgaagctgaagatgcgcggatgctccagatagcgtcctacaatgcttgtgaccgtgatattttccgtatgacctttgactcctggtaatatacaacatattccccggacaatcaagtctgtttttacaccggccctcgacgcctccgctactttctctataaaatcgacgtccgtcagcgagttcattttcatgacgatgcggccgccgctgccctttctgatctcctcatccatcagatagagcactctctgcttcaggctcgtcggcgccacaataagcctgttgtacagaccgtccagattactgatagacatatttttgaaaaactcggaagcgtcctttccgatctcgggatctgccgtcattagtgaaagatctgtatacatggccgctgtcttctcgttatagtttccggtcccgatctgcgtaatatactggatctcattccggttccggtatgtgataaggcacacttttgaatggaccttatatccctcaaacccatatatgacccggcacccggcctcttccagccgctccgaccagtctatgttattctgctcgtcaaatctggctctcagctcaatgagcacagtcacctctttgccgttttccgccgccgcgcataaatattccacaagacgcgcctttttggcgagccggtagatcgttatctttatcgtcagtacgttcggatccgtcgaagcctctttgatcagcctcagaaacgggttcatgctctcatacggataatacagcaggatatcctttttctttatctgctgcttcatcgtgcttccttcctgtacccggggcgaattctgcggcgtaaacggaggatatacgagggaacgcttcatcgcctccggcagatttccgctgatggcaaacatataggccagttttaccggcattttggtgcggaagatctgatttggctcaatggcaaactttccgcagaaatactgttccatctcctcgctgagcttttcagccacctcaagtctcacaacagccatcctgcggcgtttgtgaagcgtctccttcatcaggtagcggaagtcatcgttcacctccagcgcctcatcgtccggcgctatgtcggcattcctcgtgacacagatataattcttatccgtcacttcatactgttcaaacacgaggttcagatattccatgatcaccttctccatacgtatataacggatatcatgtcccggcagatacaagatatctgacacaaactgaggcacgggcacaatgccctgcatcgacttatccttatatttcagattggccgtcacatagatctctttgttcagaaggtgcgggaacggatggtttgcatccacgatctgaggtgagagaatgggaagtatctgttccttaaaatacttttttacgtatttcttttcagactgctccagttccttgaaatcaagaccgcagacgccatacggactgagctgcttctttatctcagcgtacgtcttatccctttccttgtaaagcggtgccacagcgtcaaatatcatctccagctgttctccgggcgtcaggcccgaacggctgtcgatcgtgttgggatctgtctggatcatatcaaacaggctgcccacccttatcataaagaactcatccagattactcgtaaagatagccacaaacttcatccgttccaggagaggcaccgtcggatcctgtgcctcctccagcactcttttgttgaacttaagccatgacagttctctgttctgtgtgtagttaagaatatcattttccatacttataacctcatccttctttcgtatttctgaaacgtaatcagtatatgcacccgggcattattttcagaataccagatcagagcttccgcctctaccacgcgcatgttaaatccgcgtaaaatctctttacattttatcacttatccgttgtaaaataaaggctcacttttgccgcgcagactcttatgtatataaaaaagaagatgtcccggaagatcattcctccggaacatccttttatttgttctcgataaatcctttggccaccagtgtctctgcgcagaggaccgctcctcctgcagcgccccgcaccgtattgtgggaaagaccgataaacttaaagtcatagatcgtatcttctctcagccggccgacagacacacccattcctttttcatagtctacatccattgcaacctgcggacggtcgtcttctgaaagatactgtacaaactgcccgggcgcgctcggaaggcccgcctcctgcggaaatcctttgaaattcaccagtttttcaacgagctgctctctggtcggtttcttctcaaaattgataaacacagctgccgtatgtccgttcagaacaggtacccttacacactggcaggaaatcttcggaagattcgcctttacaatttctccgttttccactgtgccgagtacacgaagaggctcctgctcgctcttttcttcctcgcctccgatgtaaggaataatattttccgtcatctcaggccagtccttgaatgtctttcctgcacctgatatggcctggtatgtcgtcacaactacttctttcggtccgaactctctccacgccgcaaggcagggcgcatagctttgtatggaacagtttggctttaccgcgatgaacccacgggaagtgccaagccgcttcttctgtgattcgatgacgtcaaaatgttccggattgatctccggcactaccatcggtacatccggcgtccagcggtgcgcgctgttgtttgacacaacaggcgtctctgtctttgcgtatgcttcctctatcgctttgatctcatcctttgtcatgtcaactgcgctgaacacgaaatcgacagattccgctactttttccacttcattcacatttgccacgacaaggcttttgaccgcttccggcatcggcgttgtcatcttccagcggcctccgacggcctcctcgtatgtctttcccgctgacctcgggcttgcggccaccgtcaccacttcaaaccacggatggttctcaagcagagagataaaacgctgtccgaccatccccgtcgcccctaaaataccaactctcaatttcttttccataactgtcttctccttccgttaaacggcccgggacaccccggtaccggcctttaatattcttccatatattttctgtaaagagcgatcgtctcttccatggcatgccgtcccggcgcgccggtcgtgattctcttgttcacgcatgtctccagactgatcgcctcatagatgtcttcctcaaacacgtctgatatttccctgtaatcctttaacggaagctcatcgagcgcgatccccttttcaatacaggtcagtacgagctggcctacgatcccgtgcgcatccctgaacgcaaccccatggtttacgagatagtcggccgcgtcagtcgcatttgtaaagccgttcctggcgctcttttccatgcggtctttcctgaattccattgtccttatcatcccggtaaacagcgcaaggcatccttttgtcgtatcgatggcgtcaaatacccactctttatcttcctgcatgtctttattgtaggcgagcgggatccctttcatcgtggcaagcatggcattcagggctccgtacacccgtccggtcttacctcttacaagctctgctatatccgggttctttttctgcggcataatgctgcttccggtactgtatgcgtcgtcgatctccacaaactggtattcattggaattccatatgatcacttcttctgaaaagcggctcagatgcatcatgatcgtagaaagcgccgagagcagttcgatcaggtagtcccggtcggacactccgtccatactgttcagtgtcggtccgccgtcaaacccgagcattctcgccgtatattcccggtccagcgggtaagtcgtacctgccagtgctccggagccaagagggcatgtattcatccgcctgtaaatatcctgcagcctttcatggtctcttctgaacatttcaaaataggcgcccatatgatgggcaagcgtgatcggctgtgccttctgaagatgcgtaaacccgggcatatatgtatcaatgttgtcttccataatggccagtatggcgtggagcagtccctcaacctgattatccagcagatgtacctcgtctctcgtgtaaagcttcatatccagcgcaacctggtcattcctgctccggcccgtgtgcagcttctttcccggttctcctatacgctctatcagcgtcgcctccacaaaactgtggatatcttcgtatttatcggaaatctcgagccgtccgctctccacgtcgtcaagaatgccctccagtccctgtacgatctggtccttttcgtaatctgtgagaattccctgcctcgcgagcatcatcacatgcgcgatgcttcctttaatatcctgtgcatagaatcttttatcaaatgaaattgatgcgttgaaactgtatacaagccggtccgtctcctttgtgaaacgacctccccacaattgtgccatatggttttcttcctttcatgtagaatcattgtaaaagattttatcatatttctgcataaaatcaaacgaaaatgtattattttacattttttaatgaaaattcacatccgcagtaatcctgtctgtaaagtccaaactcttttgaaagctctatggaacgcttgtatccgttctttttcttaaaatctgactgcagatacgtaacgccgtaatccttctcaagtcttatcccgatctcattcagtctgtccgcgttcttcatcggacttatactgagcgttgtggtaaaataatcaaaaccgcctttttgggccagttctgccgcttccctcagcctcagctcataacacttaagacaccgttccccgccctctttcagatgctccatgccggctgccatctcataaaaccgctctctgtcgtaatggccggcaatgaacgaaaccggaaaccttgttttcatctccccgataagcgtctgctgttccaatatacgtttcgtatattcactttcaggataaatatttggattataataaaatacggttatgtcaaaacagtcgcttaaatattccagcacataactgctgcacggtgcgcagcagctgtgcagtaaaagccgcggcaccttcttttcgcccttcagcctctcaatcagtttgtcgagttctttctggtaattcatcaatctgtttccccttgcacgattctcctagtcccatgatacacttcggacttactgtatttattcagtatatggcatttctctggaaggtgcaagtgtccttttctcccggccccagataagcaccgccgctgtgccgtctttctctgatgtgctgtatctgagtttccacctgtggatccccgcaatatcccggcagatcgcaaggccgtaaccgtgaggtttcaactcgttttccgctctcacacggaacatcccttcattccagacacagagcttttccgcaccggccgtgactttcacacgtccgcctgcattgacggcattggagatcatgttctccagcagacagcggacaagtgtcggctcaccgtttatactttgtatgcttacttccaattcaatcccgggatatatgtgcttcagttcttccagcataacttctatgtcgatcgcaacaaaggtgagcgttccttccctgacattgcccataatgagcagtttgtccaccacatctttcatcgtccccgcactgtccacgatctgctgcgcggcaaagaaacggtcctcctctgtgatattccccatcatgatatactgtgcatatccccggatgcccgtaagcggcgtccgaagctcatgagcgatctgattcaccggccggtagatccgcttcatcgccgcatagagcatgataccgacgacagcggacacgaatatgccggatgcagccgctgcaataaatttcctgttctgcagatcataaaaagactgtatattctccatataggtcaattccatccgcccggctccgtccataacctcatcttttatatagatatattttccgccatcatgtgtcagaatacaatacttctctttcggcacatcctgcagagggatcttgtccgcaaacacagcgtcaccggaacgcactttgagcaggatccctgcctcttcatacctctgcgccatatatccggcgtccgtggcgatatgccctccgctcagcttctgtattgactgcagtacataagtgatctcccgctcactgtccgacgcacgtctcatcagatagcctaaatctgttctgaatgatactgtgaccatcacaaagagacaaatatatactacgagaacaaagagtacaaatgtgacaaggaaatttttcttccaaagctgcatttttacatctccaatctgtacccatacttaaatatggtctttatctgtttctccagtccgagcttctgtcggagacggcgtatgtgcacatccaccgtgcggtcatccccgtaatagtccatgccccaggccagatccaatatctggcttctggaaagagcgatattgcggttttcaagcagcactttcagcagcgtgtattctctgtgcgtcagttccaccagtttaccgcgcctcctgacaaccgcctgccggatgtcgatctgtgtatctcccagcttatacaccgtctgctccctgccctctctgcggagtacgacctgtatacgcgcagacagttcctccagggcaaatggtttcacgatataatcttccgctcctgccatcagcccttttaccctgtccggtatctcgtcccgcgccgtgacgcagatgacaggaacatctcttatccttttcatgacctcgaatccatccatatccggaaggctgatatcgagcagtatgagcgccggacgtttctcctccacggcctttagggcctctcggccagtatatgccggaagccctctgtgtcctattattttcaatgttctctgtatgagttcattgatacttttatcgtcctctacgatcagaatatctgccatcgttctgctgtccttttattcctcagtttttcggatggtcggatgcgtcataggcagacgctcctatttcttccagctgttctgccgtcagagcagatatgaccgctgtatcagggtcaatgccgtatttgccgcatatttctttaattacggtcctgcccccgccgaaagcgtatacatcattcatatatgtttccagtgacattgtcgcgctcgaatatccattgtctttttctatggcatttttatcctcattcttttccaacagaggattcgctcccatatcttttcgcagtatgagcgcctcttcaaaactgcgcatttccgccgtcacctcgttcatggtgactgtttcatagtctgcgccgaatttccggcacacttcactccctatgtccctatagctgtcacttaatatatctttgtatagtgtgtcgtcctcccacggaacatttgtcctggggagctcattctctccggcatccttttgtacctctttttctgccgcttttactacatctttctccgcctggcttctggaatatacgattcctgccccgaaggctgctgtcagacagacgaccaggccggccgctgtcaaactgactctgtgctttttccaaatctgtttcatatactctgcccctttcttctatccatgatgacttgtcccttatctacgatctcatcataaaggagaattgtttcagacttattacgcaggcacccttttcacatttccacataaactaactatatatcatccaggcttaggaggtttccatggaccaaatattagagcttcggcatatccactacgcctatcataacatggaaggtgaaacccctgcccttatcgacatttcattttccatgaataagggagagtttgtggcaattgtcggaccatccggctgcggcaaatctaccctgttgtccattatatcaggactgatagagccggaaaaggggctgattaaaatcaatggtaaatacttaagagaaagtacgaccaatatcggttacatgctccagcatgaccagctctttgaatggcggacgatatacaacaatgtgatcctcggactggaagtccagcatatgctgtcggccaggagcaaagaaaaagcccatgaactgctggacacttacggattaaaacaatttgaaaatgccaaaccgtcagagctgtccggcggtatgcgccagagagccgcccttgtgcggacactcatactggaacccgatattttgcttctggatgaaccattttcagctcttgactaccagacacgtttaaatgtcggtgatgacatcggacagatcatacggaaagaaaaaaagactgcaatattagtaactcacgacctttcagaggccatctcgctggccgatcgggtgatcatcctgaccagccgccctgcaacgatcctgcagacgctgcctctgaaatttgatctggaacaggacactccgctgaaccggagagatgcccctgaattcaagacatattttaatttaatatggaaggagttgaacacgaatgagtgaattgtccgccggtcagcggcacttcctttcccagcagaagcggcataaacgaatcgtcagcgtatcccgtatcctcatactacttagtttcctgtttatttgggaatttacagcaaatgtaggcataatagattcttttatcttcagcagcccttccaagatagcactctgcttctggggaatgctcatggataaaagtatctttcttcacataggagtcaccctgtatgaaacgatcctgagtttcgtcctcgtaattgccatcagtatcctgatggcagttgcactttggttcagcccgaagctgtcagaaatactggacccttacctggtcgtcctaaacagcctgccgaaatcggcgctggccccacttttgatcgtgtggctgggcgccaacacaacaacgataatcgtcgccggaatgtcggtcgcgatctttggcagcatactgaacctgtatacgagtttcacgacggtagaccctgagaaaataaagctcatctacacattgcacggctccaagtttcatgcgcttaccaaggttgtcgtgccaagctcgataccggccattatcagtacgatgaaagtaaatataggcctttgcctcgtaggggtgatcatcggtgaattccttgccgcgagagacggtcttggatatctgatcatatacgcaagccagacatttaaactcgactggctcctgatgtctatcgtactgctctgcatcatggcaatggggttgtactcgctcataaaccttattgaaaggatttatctaaaacgggtatgactttgttgaataaacggcaccttaagtcagtcataaaaagcagccgcgtatcttacgcagctgcctacatattccaatctgtttttatatcttttatgatctttttaaatcaacctcacttcattcgcaataccattatctcatatccttgcaatccattttcactgttgctataatcaaaatataatagatagaaagcaggtgtcattatgaaaatacacgaatctgcagaaaattaccttgagacaatcttcatactgcagaacagaaaaccttccgtgcgttccatagatatcgtcaatgaactcggtttttccaagccgagcgtaagtgtcgccatgaaaaatctgcgcaacaacggttacataacgatggatcctgacgggtacatcacgctcactccttccggcagagaaattgccgaaaagatgtacgagcgtcatacttttttgtcgacatggcttacggatctcggtgtcgcacccgacgtagcagcaaaagacgcatgccggatcgagcatgtgatcagcgccgagagcttctctgcgatcaagaggtttgcaagcaggatatcgtcctagaagaaaatgcgttccgctgtttcttttatcgaattttcatcctttgaatacaaatgaaactgcacgagcaggggattgtcggtaacgatcccatccgcttcacatccgaggactttcttaatacttttgtcactgctcgccgtccagccatacacttttttcccctggacatgcgcctcactgacaagctgcctagacagaaacgtagtctccacactgtatgcgtctacctgcttcaggtcatattgatccgatacgagtaaaacagatatatacgttgttttgatccgggagtttaaagactttactttttccaacaggctgaaatccatcgaagcgatattgcactctgcttccatattatatttttcgataagcgaaagggtctcttcaacgagtcgattctcatttcctgtggccttcagttcaatcataagctggattttccctttggccgctttcagcatgtcctcaagtgtcggaaccggctcaccggcatattcctgggagaagacgctccctgcatccagttccttcacctgcccgtaaacggcatccctgacatccagatctacccctgtagtcctcttaaaatttgtatcatgcaggatcacaagcgtcccgtcttttaattgctggacatcgatctcagccatatctgccccgtccctgactgcctgttcaagcgccgccaccgtattttccggaccaaaaacaacgccggcccggtgggctactactgagatatgagaatcatttctaaagaacagctgtctgcccaattcagtatctgccataaagatgaggaatcctgacaaaacaagcaccactgccgtccgtatggccgcgccctttaccgtccgcgtcctttttaccgcatccggacgcctatctcccctgaaacggtgatacaatgtaattgacaccgcacagaagaacacagaaataaaagcgcctcccgcaagattccaaatgcccgaataagtatcataatagcggccaaaaagcattttcccgtccgccgctccttcaatacgcctcaccagcaaggccataatactcagtcctgccgcccagacgatacaaagcatagacgcaaaaataagtgtgtacgataaaacccttccggctgtaagtaatacttttcccttcagcagacttctgcttttcttccacgagtcataaaaggatgctttttcaataaggagtacaggaaacccaaatatataaaggaaaaacaagcagtttacgaacacagctgccatgagcaaaagacttacatatagtatgttatcagtgatcgcagtcatgatgaactctggtatgcgcaacgctctgaaaaacacacttgtcacaccgaaaaacgaaaagggcataaaaagcagcagagaaagggacgccgcgcgcctgggcctgaacatgcccggtacttctctgaccgccgttctgataagcccccataacgttaactcttctctgttccaccccttctcgctgtataggatcagcgcgataacctcaaaatataaatatcctcccaacagcaaaacaacacctgacagaagcaagatcgccgcaggactctgaaaaatcttcaccatatttccctggctcaggtacgcttcgccgatcagatccggcagacggcctgtcagatttcccagaaacgggaagaaaaagctgattccgatcgctttgtaaatgagttcaaaacatatgagcacgctcgctctgcttatcataactgaaataattgtccttacgttcccacattcattgctgccttttttcacctgcactcctccggttctttattataaatatgattatttactatactctgcagtatatgcattaaactataccacataaaacgtctgttttacagtagtctgtatctttatcacgtattccgcaagagaagaaatggctgtcagctgaccatctcataatataattcagctatattgagggcgtggtctccaattctttcaaaatctgtcagcatctcagaaaataaaagtccggcttccggcctgcagcttccgctctgcatccgtttgatctgcttcttcagataactctgctgcagatcatctatcttctgttcattctgggccgtcttttcaagtatctcccttccggaagctccctttgaaaattccagtacatccagcgtctcaagacttacccgtttcatctgccgtatgtcctcctgcgcatgctctgaaaaagaaagtccccattttttcatatcttcggcataacctgcgatgttcaccgcgtgatctccgatccgctctatattactgatgatcacataatatgcattgatgcactttgtgtccggtccgctcatctccatcgtcataagccttccgatatagcgcgatatctctgtattcaggaagtttatgtattgttccgcggcttctattttctctgccgatgcgttccctgcgtttaatgccgcgtcaaaaccggccgccgcattgctcctggccatggaaagcattcttcccacttctttttcaatctccgacagggccgctgccgcatgccccacaggataggagggttcaaacggcgaaagatatataaggtgcatgacctcatccgcctcctcccttttgtccggaagaatgcggacggcaacccgtgccataacattgccgaacggcagaagcagtaacgttgtcacaatattaaacgtcgtgtggacattggctatctgctgaaccggattgcccgcggcggccgcctccatccaggatacgaacggtgtggccatacagaccagtgtaaaaagaaccgtacctattatattgaacatcagatgaatgatcgtcgcccttttcgcatttgtctttgtccctatggaagcgagcaccgcagttatacacgttccgatattctgcccgaacagtatatacacggcgctcgaaagcggtatcacccccgttcccgccagcgcctgcagaattccgaccgaggctgacgaggactggatgactgccgtaaataccgcgccgatcacaataccggtcagcggactgctgaaggttgtcataaaatgaaggaacgcttctgagtcctggagcggctccattgcctttcccatcatatccataccgatgaacagtacgccaagccctgcaaatatctcactgatatggcagatctgtttgttctttataaacaggatacaggccacgccggcaaatgcgatcagcggggcgaccgccccgatatccagggcgataagctgacctgtgaccgttgtgccgatgttggcgcccataatgatccacactgcctgattcaggctcatcagtcctgaattcacaaaccctacgaccatgactgtggtcgctgacgaggactgtatgaccgccgtaatcccggccccgaccaatacacctttcattctgttggaggtcagtttctccagaatctccttcatcttgttccctgcagctgtctcaagtccattgctcatcatctgcatcccgtacagaaagagagccagccccccaagcagcgtcaagatatctgttcctctcacttcttcgtcctcctttccctgaactctttccatgtcacccacagcggtcctgctatacagacagaagaataacatccgctgatcacgccggccagcagaggcagtgcaaatactttgatagagccgatatcataaacacaggcaaatacaaggacgaccgccgcgcaaagcgctgtagtaaaggcagttttcacagacctgccgatcgtctctgtaatactgcggtctaccagccggcacagcccttccttcttccttcccccgcgcgccagattctcccgtattctgtcgtagaggacaatggtgtcgttgatggaatagccgatgatcgtcagcgtcaccgccacaaacgcatcatttaccggaatctttcctatcccgaacacaaagagcacaatggccgcatcatgcagcagggcaatgacagccgttatccccgccgaaagccctgaaagggcggaaaaacggatccagacatagagaactatgaacagtgacgaaaggccgaccgcggccgccgaatttttcagtgcttttgctccgatgtaaggttctaccaccgatgtctcggagagcgtatacgctgcttccttatcctgaccgagcgcctccagaacctttttctgctcatccggcgcgattcctttattaccggccagtgtcaggataagcttcttctgtccggtcagaggatcttctgtgatctgcgtgctcaccggacgttttaccagcttctccacagccgccccggcctgcttcgtatcggcttcacccgtataggtatagcggagaatggcaccgccggtaaactgtgtgtccagtctgatgccgttcgcaccgctgactgccgccccggtcagaagcaccacggcggtgaacacatatattttcctgcgcccggcggcaaagtgaaggggtctctgttccttcttccttcggaacatctgctccctgctgcatacatggtaccgaacggcggaagtcagcataaagcgcgacatccacactccggccagcagattgataatgacaccggtgaacaatgtataaccaaagctcagcatcgtcccggagccgaatatcatcaggatcaaagccacggcggctgtcgtgacgttaccgtccagcacggaggaaaaggcattcttataaccattctttaccgcaaggcgcacgcccgtcccccggctcagttcctcctggatccgctcgctgattatgatattcgcatcgaccgccatccctgcagacaggatgagccccgcaatgccgggcagtgtcagcgtatactgcggcagggacagcgccagtatctgaagcgacatctgaaagatcagcgtcagacagcttatgacgccgggcagacggtaactgactatcataaaaatacagatcagaacaaaggccacggccgccgccgtcaccatagcccgcagcgcattgtttccaagcgctggacttatcgtgttgtaattggtcgtctccatcgaaaacggaagcgcgccggcattgatcttttcagacagcgctcttgccgcgtcaatggaatccatgccgtttatcactgcttctccgcctgtgatctgctgctgcacgaccggggcagagatcagcctgtcatccatatagatctgaagctggcggccggtaagcgctcctgtcgcctccgcaaattcttttgttccttttccgtcaaaggaaagctgcacttcatatccgcccgtctccgtattcttgacgggctggctgttcttcacattctgtccttctatcaggatctttccgtccgggtctctgaatgtaagctttgccgtctcacccagctccgaaatggcagattccggatcaaactctttttcatcagacttccatggaaatcgtacgatgatgtgcccttcctttttgtcgaccgtcacctcccggtctgttatgttcttcgcgtccaggcggctctccattacattcctcgcggcctccagctctgatgccggcggcgtctccttcacccccgcgggttcaaataccgcctccacgcctcctctgatatcgatgccgaatctcatatcacgtacacccttcagatcatctccgcagccaaaaaaggcaaacaaaacaaaggctgcaatgataaacaatgccagccatatatgatttctcttatttttcaatgtgcttttacctcctaattcatttccgaagctgaactccggctaagttacgtcaggcggcagccgcacgttttttaccatctctctcatggataacttggatttgacatagatacacatgcgcgatcgtcacgcacatatcaagaactgaaagaagactccttccaggtttcccgctgaaagcagttatcaacatacagaaaagcgctccggataaaaatgcagctccggcgcctcttctcacttttgacaagacagaagaagtcttttcaggcatatgctcccgcaagcctgttttaacctgttccgcctcaggcatatgaatgagaggctctctctgcgtcatcacactgtgcgttgacgcgctgttttggacggccctttttgcctccggggtctgtatgcagcaaaaaaacagccctgtgaaaaacaatgtaaaaaagaataactggatgtatctttttctcttgtccatagggctgcctcctgtctgttgcttatagcagattttaacacgccgcttgacggttcgtcaatagcggacgataccgattcagacggttgttaaaataagaggtactgtctctgcgcggactacgtccacaaggccgcagtctgtaagctttaatgccggactgacgggcagaccaagcgtacagagcgacatgatcggattataatgccggtaaccgagagtgataagactcttcctgacaccgctcagcatcctgccgatctcgtctgcaggctcctctgagaggatgcccgccaccggcagcgcaagttccgccgtgatcttcccgttttcagccgtacagatgcctcctttaagctctatgatccggtgagcagccgcaagcatatcttccacgttgctgccgatcacgagaagattgtgatggtcatgaaaataggtcgttgccgccgctccctttcggatacagtcgcctgtgacaaacccgtaaccgatgttaccgttttttccgtgtctttcaaagactgccgcaagcatgcacccgctttcttcccactgaaggcatccgtccttcaccttcatttctctatggatctccgtggtctgcgtacatccgtcctgtacctgtatgacacgtaccgctgccctctctcccttcagtcctttggccggcacaagcttgtcacacgtaatatccggcagatgcagactgtcataaaacggctccggaaacatatgaccgccggcctggtctgacacttctcccctgcagaagatttcttttccgtccttaaatacatattccggctgaaagacgctgcattctacagttcttatcagctgaaagtccgcttttttacccggggcgatcgcgcctctgtctctcaggttcatccgcctcgccggtgtataggatgcacagtatacagcctcctcaagcggaaagccaagggccacagctttctgtaccacatagttcagctggccgtgctccataagttcatccgccatcgtatcgtcggtcacgaagcagcagtgctcgtacaatctgttcgtgatgatatgatccagcacttcctcccgcagcatcttctcctggagctcaacaaacattccgccggcaaaacggtctttcagctcttcgagcgtgtgctccgtatggtccccgtcaattcccctgtaaaggaacttcgccagatcaagtccggtcagcgtcggacaatgcccctcgatcacggcctgaggatcctcctccctgagatgatcgagaaactttgtgatctccagttcatccccgcgtatgatctgccggtaattcatcacttccccgacgcacacgactccgtcttcccccatcagatgcttcatctcctcaaagccgatcaccccgccggtcgtctcaaggcggctgttcgtggacggcacgctgctcgggatcccataatatatgtctatcggcgcgtctttggcaccgttgatcatctcatggattccctgaactcccgctacattggcaatctcgtgcggctccgacacgagcgtcgtcacaccgcagccggccgcccgccttccaaaagataccggtgtcatcatggaactttctatatgcatatgaatgtccacgaatccaggaagcatgcggtagccggttccgtcgatcacccgttcaggttcaagcatatcctctctgacgtccgctgtctcccggcatacgtaatatatcctgcctcccagtacatatacatccgcagtctcaaacttcttcaggtaagaattgtatacttcagcatttttaacgagtaaatctaccttctccatcacataccctctcctctacaatattgaatagaagtacaggaggcacactgccacaagcacccacattgccgggcggacctcctttatcttgccggaagcgatcttcatgataaggtaagacggcagcgcggcgcagatcccgttggcgatattgttgccgaagatggtaaacgcgatacagacgaaggccgggaatgcttctgtgagatcgtcgtatttgatatttctcatggctccgagcatatttatcccgatataaatgagaaccggcgccgtggcggcggaaggtatcatgagcgccgccggtgccagaagcagtgccagaccgaacagaacggacgtaaatatgacagtcagcccggtctttcctccggcctccacgcctgcggaagactccagataagtcgtcatgctcggcataccaaacaatgccccgaaactggtggcgaccgcatctactttgaagcatttgtcaatgccgggaagattgccttcttcgtccagataaccggcttttgccccaacgccgagcaccgtgccgaacgttgaaaagaaatcaggcacaaacaacgcgatcaaaaacggaatgtatgcaaaattcaaagcccccataaaatcaacattcatgaactgtctgccgatgcccgccggcattgtaaaaagactttccggcatcttcgtgacgccgaacggaattccgatgacagtggctgccgcgatcgccaggatcatatccccctggacctttctggacttcagaatgagaaggataataaaaccgatgactgcgacaatgacctccggagacgtcagatcgccgaatccaagactcttctttgcctcattggcgatgataagtccgcagctctttgctcctaaaagcgcgataaaaagtccgatccccgcgctgacagcatgtttcaggctgacaggtatcactcttacgaccgcttccctcagaccgagaaatgagatcgcaataaacagaacaccactccagaaaataactcccgccgtcacagccggagcgattccgtcatttgccatcatcgctgtcacgatccccacacttccaagtcccggcgccagtgcaaacgggcggtttgtgtacaatgccatggcgcacgtcgtaaggatgacgagcaatataagcaccgtaaacatcacatgtttgtcaagtcctgccgattccatcatattcggtactgtcgccagcacataagccatggtcacaaacgtagtgataccggccagaagctctgtctttacattggtgtgaaattctgtcagtttaaattgtttttccaaccactgtctcataaagttactctcctgttttcctcattgtattttcttgcttcttttgccctttcattgtatgataaccataattgcttgtctaattcatcttgaccatggacaccattccaaatgagaataccgccggagattttgttatgaacattcatgaactcaattatgtgatctgtatcgcaaaacatcaaaatattacgaaggccgcccaggaactttttatctcccagccgaccttgagcaaacatctgaagaaaatggagcgtgaactcgggctgaagctgttcagccgggtagataactgttacattccgacgtatgcgggcagacgctacatggagtacgccgctcaggtgcttgcgctgacacaggactgggagaaggaactgtccgaccttctctccttaaaagacggggaactgacagtggcattcccacttatgcgcagctcctgcatgctgccctttatactgcctgcgtttcacagaaagcatccgcacgtaaaagttaattttctggaggagacacactccatacaggaacggcttcttgaagacagccagatagattttgcagttttcagcgaagaaacgatccatccccgtctggattatgaggaactgggccgcgaagagatcctcctcgttgtcccccggacgcatcctcttgcggaagagcttcctcactatcccgaggccggcggtgcctatccggctgttgactgggaaaagctgaaggatgagacctttatcctcaattcaccggaacagaacaccggggctgtcactgcaaagcttttaaaagaacattatgtaagcccggcggtctccttttacacccgcaatacacaggcggcccttctcctcgttcagaacggggagggactctgttttgcaccggagtcctacgtacgcagcaccgcctttgaagcgccgcccgtctgcttttccctgaaagatgaaagagcgttcaccacaacggtggccgcctaccggaaaggagcctatcttccgggctatgccagggactttatcgaaaacgcgcgggcctattttgaaaagtacactatgtgaaggaggcagatataatctatctgtagatctcattcagctttgtgtagagaggagaaagtctgccgtagatattgcgaaagacattctcatacagttcttcgtatatctcgtgctgcttcatatcaggctcaaacacatctttcacgtgcaccatgctgtggaccgcttcttcgtaatctttaaatacgcccataccgacatatgcagtcatggcgcttccgacacctgtcacctcatacgtctgcgtacggatgaccgggatgccgaacatgtcagccgtgatccggcagatctcatcgcttctggaacctcctcctccgagtcgtatctctttgaatgtatgccctgtacgtctttccatcagccgcattccgtccatcagcgcaaaattgattccctccacgatcgcacggtaaatgtggatcctcgtgtgctggtcggaaaagccgatgatggcccctctggccgcaggcatggtcacattcggcgtaaagtagggctggaacagcagaccgtcacagcctgccggtatctccttgagccgttcgttgagaagttcctcagccggtatcttaagctctgccgcctgctttacttccttctgcgcaaattcttttttgaaccatgagatcagccagtatcctctgtagatctcgatctccggcgtaaagcatcccgggatgatcgagatataaggagggataaagcgctcaggttccacataccggtccattgtatatgtaactgttgccgtcgtcccgaagccgacggcggccttttctttcgtcacacatccaagccccagtatctcacacgctttgtcggaacctgtggccagcacgggaaggcctgtaccaagccccgtatcccgggcagcctgctccgtgatcgtgccaagctgccggccgctctctttaatatcacacagtttaccctccggaatatcaaagacagggcgggtcagcgccccttttctctgccaggaacggttctgggcgtccacaggcagatgccccaccaggctggcagccgcatcggccatgtttccggtcagcttaaaggtgaggtaaccgctcagaagaagatacttgtatgtccgcttccatatatcgggctcattctgcatgatccagttacagtgggatttacagaactgcagatttgctgtctcctccataccgaccgccttgagcataagccgggtcatctgtgacattgcgggccgcccttctgcccttcgcttatcgagccatacgatcgcggggcgcagcggactgccgttctcatccacacagacggtcgtatcccgtatcgtcgtcaccgtgacggcctctatctgcccccacagtctggcacatgactctttcagttcaagcgacgcccggcagatatgctcataatagaaatccgcacgctgttccgcaaatcccggctcaggagaatcatacggaggttcatgcgtctcctgcgctttggcgaggatatccccccggctgttaatgagcatcgcacgggaactctgcgtgcctacgtcgaatgtgagtacgatatgttcctgcttcatataagtcccccctccccggtcctaacggatatcatcccgcagaaagcgcttttcctcttccggcagatcaaggcccagcgtcccgccgggattcataagattatccgggtcaaaatattccttcagtaccttgaacactccatattctgttcttccaagctgtccttccagccatggcgcgaacatcttgccgatgccgtgatggtggctcattgccgcccctgacttctggatggcgtccagtatcgtgctgtggtatgccttgaacttatccgcgtcatccatccgtgtaatgaaaataaagtagagattggcgccctgcggatagcagtgtgacatatgtgtcgtcacgatcgtattcggaagtgcatggcacaccttcctcacttccctgtgtacctttgccatgttcgaccagttgaccgtacactcaagcgtgtcagtcatgatcccaaagtccagaagcgtatcccgcagataaggatcattgaacctgcccttctcccagcttttcgtcacgtaggaagtcaggctcattccaccgtattttctggcgatacgtctgatattgtccgctacattcctggaaaaccccttctctccgtccgtaaacccgaggaacaggcaccgtttcatatcctcaaatccccgcacattgagcagcttccagagcggagtatcgtccacgttataaagccgcagcatcaggtttgtctcctccggatccgacaggcggaataccgaggaaaagcctgcctcacactgcatcatctcccgggctgccgcccgcgcggtcttccagtttttaaatatatacgaaaagcgctctctgttctccggcatgtagcggaacacctttagcgtcacctctgtcagcacgccgaacgcgccctcgcttcccatcatgatctggttcaggttcggaccggtcgcctccctcggatagcagctcgtctgtatcgtaccggccggcgtcgcatatttctgccccatgacgatatcagttatacagccgtaataggtgctgttctgccctgcccctctcgtcacgacccagccgccgacgctgctgtactcaaaagactggggaaaatgcccgcacgtatagcggcgttttgctccaaataattccggcgcgtgattcagcgctttttccagcttcggtcctgacatgccgctctgtacggttatcgtctgatccgtctcattgaacgagatcactttctggaaccgctttctcatgtcgagggatatccctcccttcacaggctccactccgcgtgtaacgctgctcccgccgccatatacatacaccgggatcttatgttcacaacagtatgcgacgatgtcttccacctctttcgtcgtgcctgggtagacgactgcgtccggcagacagtccacacgcctgccgcggagccgcagcgcgtcatatccggtctttccgtacgccaccgcaagccggggataatcgtcagtcgtaacgtacgcttcccccacgatcgctctaagcgcctccagatggtcctgtgaaagattacatggcgcgtcgagctttacgcggtccatcccgatgtctccgtcatacgcgcggaaatcgtcgtccgtcatgttgaacttttctttcatcatcttatacagtgattctttcggatatttgacaaagtccggatctccccaccggaatatggagcggtagctgtctttcggcgcagcctccttcacccacttcggttcaaatcctttatacggtttactcatatgatccactcctttactcctgctctgacaggatactgctcgtcgcgataacatctgctccaaggccaagcacatctttaatcaaaacagttcctctttttactctttctgacacaacgatcttattgatctcctccataacatcgaagatccgttcttttggtatctcctttgacaccctcaccggaatgaccggaacgtccggaaataccgttgcagcggttgagcagacactcctcaccggatgggtcatctccgccgccgcgaaatccgcacctcttttacattggttccccttcactttgaagctgcccggttctccctccacatgaagcacacatccattcggacatacgatacaagtcagttccttcatcttaccgccccttcctgccgtatatgtaccgtgacctctgattcccgcccgatccccagtttactgagatcggctgcgagccgttccatctccggcggtctcaggttacggtaatgctttgtaaagatttccttcccgtctgcttcgatgacaaatgtgccgtcctttacggtctcccggcttctgaaatagaggaccgccgccccttcggcctgtatatccagcttctgcggcacaatatactggatcgtcctgtccggaataagctccacaaaagttccccctgccgccccctgacggtaatgagcagcggcagcgcctgcaagttccccgctttccgacacatggtcgaccaggtcattgacatggagcgcatttccgcatgaaaatatccccggcacgcccgtcataaagtgcgaatcacagaccgggccccgtgttcccggacagatgggaactccgagagattccgcgatctcattctccggtataaggcccacggagagtatgagcgtatcgcactctatgagttcctccgtcccaggcaccggccgcatcccgccgtccacctgcatgacttccaccgcctgaacccggtcgtccccgaagacccttgtaaccgtgcgggacagatacagaggaatgtcataatcttccaggcactgcgcgatatttcttgtaagtcccgagggctccggcttcacttcatagacgcccgcgacttttgccccctccagtgtaaggcgccgggccatgatcagaccgatatcgccgcttcccaggatgacacacttctttgcaggcatcagccccgacagattgacaagatgctgggccgtacccgctgtaaatatgccggatggccttgtaccgtggatcgctgcctggcgcgccgtccgctcccggcagcccgtcgcaagcacaagtgactttgtcgtatattccgagacgccgtgcgcattgaccgccgtaatgagaaaacggccagcctccttatcgatggaagtgacaaaggtctgcagctcacatgcgatctgcctgcatttaaacacttccgtaaaccgctctacatattccggcccggtcagtctctccccgaaccggagcagtccgaatccgtcgtgaatacactgcttgagtattccccccagcctggcctcccgctcaatgagaagcacatctgccccctcttcgtccgctttcagcgccgcagcgagccctgcgggtcctccgccgatcaccgtcacatcatatgccctcttcatcgctgccgcctcctttgcccttcgtcctgccatacgttatgactgaacctgcgcctgccttctttacttcccccggaggtatgtgcatatattcacttatgatatccaccacaagcggcatgcagaaccctccctgacagcgtcccatccccggccgcagtctcttctttatcccgtccaaagtgggcaccactatcggagccttaagcgcatccactatctctcctttgctgatctcctcgcaacggcacacgatgatcccgtagtcaggattctcctgtatcattttgtcccgttcttccttcggcatatttttaagcaccggcactcccctgcggaccggattaaaattttcattccgcaggatggtccttttacttcggagttctgttacggccatctcctctacgtcaagcgcgaccgccggagccgtcgtaagccccggagactgtatcccggcacagtggatcagattctttgtccgccgccctttctctatgataaaatcctcctcaaatgtggccgggcggactcccgtaaaatatgtaataatatcctttttgtcaagccctgccgccgtcatcttctgtttggcaaacactgcgtcaatgctttcctgcattgtggcaaagttctccttttcatatgtctcctgcgcattcggacctacgagcaggttgccgtgcaccgtatggaggatgcccccgcccttcgtgtgggccgtcttctgccttaaggttttgacagaagcgattcctcttactatatggcctgccttcttatcgagtatggaatttgttcccttgcgcggatggatggaataaaaccggtcgcccgccatggccgcgatatcctccgcgaatgtaccggccgcattgacgacaatggacggatatatgcgtccccggttcgtacgtacgctctttatcatgccatcttccgtctccataccgagaaccgccgtatcaaggcttatctctgccccgttttctactgcattctcaccgtaggctatcgtgaggccgtagggacatacacagcctgcacttggattatatatggcaaagcagatatccgggttcagttctttttcttttctgcgcagctctttcctgcttagaagaaccgtgtccgtaactttgcatatatgcttcctgtgccatacataggcaagtaccgccgggtacatccaccagtgggtgaaccccacatactggccgcaccgttcaaagggtacgtcgagttctctgcagatcttcccgtacattttgttgccgcgaagcacataatactgctttcgtgtccccctgcccagatccactcccgggtgcacctccccgtcatttctgccggatgcctgcaccgcaaggtctgcttccttttcgacaagcagaatatccagcttccacttcgtcagctctctggcgatgctggctcccgatatcccgccgccgatgatgagcacatccggccttcttccctcgagagctccgtcactttggaccggcgttctcatacgcggcattgtcacaccttccaggacaatgtcgttgaccacatgcatcttcgtccctttctgtacacacatactgcaggcatccacaatatcctgccagttggaaagcgtccccgtcacacggatgatatcctcttctataccggcccggactgccgtcccgtaatgtttgtacagctttttattcagctttttttccagttcctttcttcccattatgatcacttctttcccgacagtcgtccgcgcgaccgacttcttattttcatagtagcaaagcagtttttaattgtcaatcagaaagcactttaatttgaacgcattcagaaattgactttacgcaaaaccggcggtacactggatatatactaaatcataaggggatattatatggctgcacctagaaaagaaaatgttaaagacctgataatagaagctacggaagaactgctccggacgaaaaagctgtccgacatctctttgtccgagatcgcccgctttgccgggatctcaaaaggtactctgtactatcactataagacgaagaccgatatactgtttgacatcacggataaatacctggaccggcagtacaatgacctcattgaatggaccggggacgcctccaaggacacgtccatgcaccggctcgtgaaatatatactggagcgggatatatcaactgccggtatgagacttcatttgttttatgacgcaatgctcgggaatgaagccatacgtaaaaaactgctgaaccgctacagtgaattcgcgtctgtcatctccgaaaaaatcagagaacggacagaccgggtccccgcagactactgtgcctggcttcttctgcttttgtccgacggactatttatccaccagacgctcggaaacgaagaactggatccggcaaagtttatccggcagtcggaacagttcatacaggaggaattcttatgatcgatgcgcatatccactacgccgcttctgtcggacaagatcggctgaatacgctcatacacgaggcacatctcgaagcgctggcgctgcagtgcataccaaaaggaggcacactgccggtggaggaagatgcctttgcgtttcaggcacagtgctctgttcctgtatatatcttcggcggtcttgaccgttcggtctatgatacggcctccgcccgcagcggaatctcttctctgtccgaaaagcttgacagcgaggtgacaaggcttatgaatatgggctgcaccggcatcaagatgctggaaggaaaaccggacgtaagaaagaacttctgcgtcccggactttgacagtccggtatgggaggcatattgggcgcggctggaaaccgaacagatccctgtctatatgcacgtcaatgacccggaagaattctgggacgcagaacatgtggcagactatgtaaagaaagccggatggttctatgacgagacctttatcggcaatgaggagcagtaccgtcagatactgtgtgtccttcatcgccatccccggctcagaatattatttcctcactttttcttcctctcaaaacagcttgaaagacttgcctgtattctcgatgctttccctgaggtgaggatcgatgtcactcccggcattgagctctactataatctgtcggcgcagggcgccaaagcgagagaattcttcctcacatacaaagagcggatcctctatggcaccgatataggcgcacgcgcgctgatcagatcagaaaacgtaccgcttgatcttgatgaatgccggtcccgcattaagctgatccgtgattatcttgagacagacggcggctaccttcttgaatccgacgggcactatgtcgcagaaaggcagcccgccgtcatgcatggactcggactgccgcaaccggtacttgataatatttattcccggaattttctcaactttatcaaatgactatctgcagagctgctctaccgcctgctccactttatccatgccggcggtaggctcaaagcggtctacgaccgtaccgtccctgttgatgagaaactttgtaaagttccattttacgtcgttgtcgttctcataatccggatcgtcggcagagagtatctcatggagctttccgctcagcggatgttcgcggtcaaagcctctgaactcctgcttttccgtcagtatgcggtagagcgggtgggcgtgatctcccttcacctctgtcttggaaaatacgggaaagctgactccgtagttctttctgcagaaagcttctaccgtcttgtcatcccccggctcctgttccttaaactgattgcacggaaacgccagtatctcaaatcccttctcgtgatatttgcggtaaagcgcctccagttcttcatactgcggcgtaaatccgcatttgcttgccgtattgacgacgagaaggatctttcccatgtactgctccatatactccaccgtcccgtcaatacgctttaattctatctcattcatattcatctgcttccattcctcctcatatctgtctttcacaatagtatgaagagaaaacgcagttattattcttttattatctccagaacatcgccggcttcaatgaagccgcctcggatgacttttgaaaatacgccttctctcggcatgatgcagtcacccatcttttgaaatatttcacagccgtgatggcattcctttccgatctgtgtcaattccaatattacatcattacaggcgaaacgtgtgccgaccggaagttcgctaagctcaatgccgtccacgacgagattttctccaaacgccccgttccccacaacggctccccggctgcaaaactcctcgatcttaccgtatgacagaaggctcacctgccggtgccattttcctgcatgcgcgtctccttttattccatagtcttcaataaactctgcacgtcccacatttttcttctgtgtccccttttcgggactcgtgcagactgcaatgactttgcccatctcatcctcctattctggacatttccatctcttccatgccgtctgtgaccggactgtcaaaacaatgtccggcaggctttccgtacaccgcgcgtctgacctgttctctcagtacactgtccggaacctgcccccgcagcagcgcttttacatccatcccgccggcatactggagacacggtttcaggtaccctgcggatgtgagacgcacccggttgcatccgccgcagaacttgtgtgaaagagcgcttatgaaaccgatacgccccttaaacccttcaaaacgtacatacacgccgggcccgttgccgtggtatccctgtacggtcttttcttctccatacgcctttttcagcgcctccaggatctcctcctgcgtcctgccggcatgctttcgtccaagtccgatcggcatcatctcgataaatctgacatctgcctccttatctctggcaatgcccgcaagcggcacccattccctgtcattgacgccggcgagcggcacgcagttcactttcaccttcagctgcggacaggaaagcgcggcgtccagtcctccgagcgcggcccgcaggccgttccttcttgtgatctgctcatacagccgttcatccagcgcgtcaatacttatattgaccgcatccagaccggcatcggccagcgccggcatgtgctcttttaaaagtgtgccgttcgtcgtaagtgtcacctgctctatatccggtatacttttcagcatcgcgatcagctccggtatccccttccgtacaagaggttcgcctccggtcagcttcacctttgtaattccgagcgatgcaaaaatgcccgcgagcctctttatctcatcatatgtaaggatctcgctgtgcggtatggccgcaactccttcctccggcatacagtaagtacacctcatattgcagcggtccgtcacagagattctcacataatctatgttacgtccatacttatcccgcatccttacgcctttccgtgccgctgcgccaatgcggcgcattcggattctcttccagtaagaattccaaggccgtgcccaagcgacggcagtataaacgacagattttccctgacagccttcgggcttcctggaagatttacgatcaaggttttcccccggatgaccgatacaccgcggccgagcattgcccggggcgtgatctgaagggaaaaataacgcatggcatcggcgataccgggcgcattcctgtccgccacgcaaagtgtagcttccggcgtacagtcgcgctcagcaaatccggttcctcctgtcgtaaggatcagatccatatgttcctcatcgcaaagccggatcagctcccgctcgatcataacctgttcatccggcagaagaatctttgccgcaacgtcatagtcttctgctgacagcagttcctgaataagaggagcgcttttatcctcccgctcccggcggtatcctttatcgctcaatgtgactaccgcagttttccacctgtatccttccatgtgactcctcctttgtgcctctattataacgcgtatcccgtcacctgtacacactgctttttctggaaaactaactatctgagcaccaatggtgttcctattttcacacaggccgagacggctgtgagcgtccacgtaagcccccgttccttccgtttatcctcacacaggctctttatgttgtcatagctgtctttcatccgctctctgcctgacagaagagagaccgcgatcttgaccgccgcccacacctggcttaatatgtaaagtacaagtgccgtctctttcagcacattctgccttttctttcctgtcgttttgtccagcgcccatatccctgccgacagaccgataaatgtcgccgcgtggtggatccatgtacaaattttaaattcgctttccttcataccttatgtaccccttataccgattttctttttctctattatagcttatccaaatgtcaaaatatagtaaaagcaatcgcaagtatctacatatttttacaaaacacgccaactgtggtacaatcaattccgtaaaatacagaaagcaggtgatctaatgggaatgacagtaaacaaagaacttcctctgcccgcggacctgaaatccgaggagccgctgactgccgatattatcgcgttaaagcagaaacgggacagagagataagagatatattcacaggtgcatccgacaaatttgcggtgatcgtggggccgtgttccgcggacaacgaagactccgtgtgcgaatatgtcagccggctggcaaagctgaatgattccgtatccgacagacttgttctgatcccgagaatctatacaaacaagccgcgcacaacaggcgccggatataaaggcatgctccaccagcccgagccggacaaggcccctgaccttttggccggcatcatcgcgatccgcagaatgcacatacgcgccataaaagaaagcggcctcactgccgcggacgagatgctgtatccggaaaaccgcagttatctggacgatattctatcctacgaggccatcggcgcacgctccgtcgagaaccagcagcaccgcctgacggccagcggcatggatataccggccggtatgaagaatcctacgagcggggacttctccgtcatgctcaactccgtcaccgcggcccagagttcacacaacttcatctaccgcggacaggatgtgacgacggacggcaatccgctcgcacacgtaatactccggggcggcgtagacaaatacggcacatgcatccccaattaccactatgaagatctgatgcggctgctcacgcagtatcagaagcgtgaacttaacaatccagcggccgtcattgacacgaaccactccaattccgacaaacagttcaaggaacagctgcggatcgtcagtgaagtgcttcacagccgcacctataattctgagctgaaaaagctcatcaaaggcgttatgatcgaaagctatatagaggaaggctgccagccgatcggcagcaaccgtgtatatgggaaatcgatcaccgacccgtgtcttggctgggaggatacccgccggctcatcctgaagatcgcagaggaggcctaagatgctgaagagctgcccccgggcggctctactttcagcttcacaagctcattggctttccgcatcatattctcccggtagctcctgccgctgtaccgcctgatctgtgtcactgtgatcccgagctgctttgccgtctcttgcggccctaccccgtaggcgaacagcgtaaacgcacatgaattcttcagttcctgcgcgctgtagcacggaatcccggccataagcgtatatttcttcatcagccggcttatatacattacattcagtttcctcccgcggctgttggtgaacaggtactctcccggcattcttttttccatgtaccgttccagcacttccaccgcgtcgcccggcacaaaacatggttctttccggtctcccgcggctgcatagactccatcgtcgtaggccgtaagatcctccgggcgaagtgccgtgatctccgttgacgacagagatacccggtacagcagggtaaagatcgtataagccgtcagatttccctccgccgccttaaaaagtgcgtctacatgctctaccggtatggatccggcaaatctttcctgtctctgaagcgctcccaaaagaggagaaaaactgtcgtgaaatccttcctttatcccatatgccgtcctgtgttcttctataaatccggcaaaggaatgaagctctcttatctttttggatacggtctgcgctcccagactgttctctttcatttttttcttgagatactgaaaatatctttccgcatcctgctcccccgtgtcaagaaaatctttcccgcacaattccataaattcctgtacatccgcccggtaggacgcggcagtcgtgccgcttttaaagtgcttcacatagtccggccatatatcgtctctcagcttctctgatgcatattctgtttccagcatgtacttcacaagaacccctccccgcttgtccgcaaaaagtttttaattatgttattagtattattcatactataacatataatatgataaataacaagagacgtctatgtgacatcccctgctatgatcactctgttttcttccattcttacttccgcgccaagcggaagcgtcagcgggtcgcacaggtgtcctgcgcgcacattacagaccacaggtatctcaacctctttaagtaccgagcggacggcttcttccccgctgccgggtctgccggtatcgtcacattctgtgagccctccgacgatgataccggcggcatccttgaatttaccgcccagcttaagctgatacagcatgccgtgaagacggtacggcttctcccccacttcctccagaaatataattttaccggctgtatctatctcaaaaggtgttcccatcagccggctgatcatcgtcatatttcctcctgtcagccttccgtgcgcggcgccttctttgatcgcacgaaacggctcaccgttcagattggacagctccctgcgcttctttggccgggtcaccatctctataaagagctgatgggcctttggttccacagggcgtttgggactgtagagcgccgggccgtggaatgtcacaagccctgtttccttctgtatggcagtatgtatagccgtgatatcactgaaaccggaaaacacaggacggttctttctgaccgcctcgtagtcgatcttgtcgagcagcggtatcgtcccgtatccgccccacatacagagcaccgccctgttacggccgtcacgcagcacaccgttgagccgctctgccctctccctggccgttcctctcttaaatgccatatcctccgatatgacaacatgaaatccctcgccctccagaaaggccctcgcattgcggaccccctcctgcgtaaacgcattggccggatcgatcacacatacctggtctccttttcgtaacggcctgggatagatcactctgtttttcatcttcattcctcatctcatatgctttcatatacagtctatactatattttagcatattctgaaaaaaaattgcaaaaagttcttgcaaaacctgacaaatacgctataataatatttgtgactgcggtcaagcggtcaacacgctggaatagctcagtcggtagagcacttcactcgtaatgaaggggtcgtcggttcaagtccgatttccagcttatatatcaaaacagcgcaaacctggtgtcagcagggtttgcgctgtttttgtctcagacggatcatcctattttctgaggattctttccagaccggcgatatccagcagattcaccgtctcaaacacccctttataaaatacagcccagttattaaaaacacagggcagttctttcgctttctgcagcgtatccacctgaatcaaagatgccaaaataccgttcgtctcacagtaccgtcttatcttctctatattctgactgacataaggacactgcatatcgtaatagatcgtcagctctttgctctcaattctcccgtttttcgcattgggagcaaaccggggctccttcccgtcaaaagaaagagcaagcagttcatatccgtttcccgcagtgtcaacagtcttaaacccggtcttctttgcaaaggactggtcagagagccacgctttctgcttttctgctccgagcatacaaatgccggacttacctttttccttcgcatcagcgatacagtactccatcagcgccttcccgtatccttttcctttgtagccgccggatacccagagacagtacagataataataatcgtcgccatttacggggacccaggctgtctcaagaggggcatattcaataaaaaccacggctttttcgttcagctttctgaagacatgcccctccttaagccgctcacggagccaccggcgctttgcttcgatcccctgatggggcttcctgctgcgtataatacagcataaatgttctttgtcaacgttttccgccgtcacgtttataaattctgcattcatatgactcctttcataccgatacgtgccggtccgtccgctatttttccttctgtgacatgtgtaccgtcacctgctggtacgggatctcaatacctctggcgtcaagcgtcagcttgatctcctccagaagccgccattttgtaggccagaaatcttcgctcttcacccacgctctggctccgatgatgacagcgctcgccgccagctcatccacaaagacaacgatctcttcgtctttcaggatacagtcatcctttttcagcagattttcaataatatcttttgccttccttaagtccgcatgatatgaaatgtcaaccttaaggtcaaggcgtctctcatctttggccgtcgcgttggtaagactgttgtttgtcagcatgccgttcggtatgacgatcgtcttattgtctatcgtgctcagtttcgtataaaaaatctggatctctttcacggtcccttcgttgccgttggagtcctctataatatagtctcccaccgtaaacggcttcaaaagcaatatcaatacgccgccggcgaagtttgacaggctcccctgcagcgccagaccgatcgccacaccgccggaggccacaagcgctgccactgaagtggtatccacccccagtttcgccgcgatggtgaagatgagcagtatataaaggcctgccttcagcaccgaatccacgaactgttccacacctttgtccgcctctgaacgctccagagacgtcctcactaactttctcacccatttgatcagaatccgtccgaccagaaatgcgatgagcgctatgactactttaattccaaacccgatcagcgacggaatatggtcctgaaaataccggacaaactcattcgcgttttctaccgcctcctgcgtaacctctgtgacttcatttgttcccataactgatactcctcctgcgtttacttaagcgcaagaaacgcacttaaatttccccgtttctctcctgtcgttctgtgagagaacaggatatccggattacaatgtgtgcagacatttgttaccgctgtatgttccctgcggataccagcctccgcaaagacatattcattggccttccacagattgagctgatattttccgtctcccttattatagaatagatccggccagcattcctcaggaaaattttccctgaagcggcagatcacatcttcactcacctcataacagtcctgacagatagagggaccgacggcagcgatcacatcttttggatcagtgccatagttttccgtcatcttctccaccgtaaccttgccgatacgtcccactgtaccccgccatccggaatgtgaaagtccgatggcccggtgtacgggatcgacgaaaaacagcggcacacagtcggcatagaatgtgacgaggcatatgcccggtacatttgtcaccatcccgtccgtttccataaaacgggcgcccctgtcctcttccttcacgaccgccacattcgtcgtgtgtgtctggtgcgtgtatgtcatgtcttccggcttcactccgattgccgaagcgatgcgcctgcggttctcctccactgtctccggtgagtctccgcgtgttgtgcttatgttcatcgtggcacagttcccggtgctcacgcccccgagccgtgtggaaaatccatgcttcaccacgccggtatcttccagcagcgggtacacaagatacggaactccttccttctctctgatatcaaatatgtgtgcttcattcttgtattttatatccagcttcatatgttctcctcagcattcaaacgcatttttaatgtggcttatctcaccgcccagtatcgctatcacatcgaatctgcacggcgcgtccgccagcttgtttaccgtgacgtaatacatggcgcattttacgagcacctgccgcttccttgcatccacggcctccgatggataccccttcgatgcatctcttctgtacttcacttcacagaatacgagatattccccgtcttttgctatgatgtcgatctctcctgtccggcagcggtaattaaagcagattatttcatatccctgtttttccagatattcacctgccgtctgctcataccggctgccctccgctcttttattgtatgtcatctgcacctctcagtcccggacaccgatcctcttatacaaagtttttaatgaatgtggccctgtgtatcggcgaaggcccatgttccttaagccccgcgatgtgtgctttcgtgccataccccttattcgacgcgagatcatagccgggcagtattttgtcatattccaccataagtctgtcccttgtcaccttggcaatgatactggccgccgcgatggacacacttttggcatctcccttgatgatcggcacctgcaagatctctatcccgggaatcgtcaccgcatcgttgagcagtatgtccggctgtaccgggagatctgtgatcgccatacgcatggcttcgtacgtcgcctgcagaatattgatctcatcgatcctctgcgggcctacgataccgatacccgttgccacagctttctccatgatctcgtcatacagcatctcccgcttcttttccgacagctttttggagtcattcagatacaggacaggatcgtctttaggcaggatgaccgcccctgccactaccggcccggcaagcggtcccctgcccacttcatctataccgcatatgtaacggtacatatcatattctttctcgtacacgctcagacgttcggtgcgttctatttcttttcgcagcttctcctcctgcctgcaaagcttctcctcttcccgcttattcatgtttgatcactcctatcttgtcaaacggatatacgcgcaggaaggctcttcccatcagatccttccgcttgataactcctacgctcgggtctctgctgtctgaactgtggtttctgttgtcgcccatcacaaaatattcatcttcactgagcgtcaccgggcttgcctccgcctgcatcagctccgcgccgtacgtgtcgctttccagcttctgtccgttgatatacacatatccgtcggtcacctgcacggtctcacccggcagaccgatgatccttttgatatagtaagtgttcttttcatatttataaggaaatacgatgatatcgaatctcttcgggtctctgaaccgatagcttatcttatctacgatcagactgtcgccgtcacttaaagtcggttccatcgaatagccgcttacccgcgtgcgctgtcccacaaaggtaatgatcaggtacgtcagacctacgataataagtatgtaaagaagccagccgcccagctccctcaatacacttccccccacatcattttttctgcgtcttgacatgtataatgtccccctttttattgcttaccactgcattttatcatacttcctgcggatattccagtgtcaggcgtcccagctttccatttctgaaatcatccgtcagaagcagcgccgccttctctgtgtccagctcatttccacgcacaagacaatgtctgctctctgctatccggcttaaagtgatatagacatcgttatcttcttcgactgcatattttttcccgagcacgcccggataatgatccagcatgaaacggatcagctcggccgccagctcttctgtctgcaggacttcatctttgatcgagccgacaaacgcgagttttaaccccacctgctggtcctcaaacttcggccagagtattcccggcgtatccaaaagctccacctgcctgttcaggcgtatccactgttttcccttcgtaacccccggtttgttgcccgttttcgtgcaggacttccccgccagactattgatgaatgtagatttgccgacattcggaatgccgaccaccatggcgcgcacagggcggttcagtatgccgcgcttcctgtctctttctatcttctccttacatgcttcctggatcacgccgtgaatggatttcatcccgccgcctttttttgaattcacttttacgacagaaaatcctttttttctgaaatactcagcccaggcgtcattccacttttcttccgccaggtccgccttattcagaagtataagcctcgctttgttctttccaagctcgtctatatccgggttcctgctgctttgcgggatccgtgcgtccacaagctcgatcaccagatctatcagttttatattctcctgcatcatacgttttgcctttgtcatatgacccggataccattgaaaatgcatatattgtctcctatcccgtaaatcccatattttttcgcggggagatcgtgaaccagacttccccgtatatatattttctctttacattaccgacgtccgcattgcggctgtcctcgctgttttcccggttatccccgagcacaaaatattcgtccccgccgagcgtgatcttctctgacgcaattcccacgtcgtcgatgtccgtcgttttgtaatcttcctcgatctttttcccgtttatataaacgctgttctcgattatctccaccgtctcacccggcagtcccacgatacgcttaatataataatgggcgttttcgttgccctttggcttaaatgctatgatatctccccgcttcgggctcgtagcgttgtagacgatgcggtttacgagcaccacgtccccattttcgaggaccggattcatcgaatctcctatcgtactgacccgctgtccgaaataccacacgtaaacaaaggccagaaggcagacgaccgctattttaaaaacccacttgcctatcacaggaagatactcccagttgatgtggatcctccttcttttcctggcaaagccaaggcttttccttcttcttctcataccgtacaaaaggccgaagccttatagacacctcctgtccctaataacagaaagaggacaatacacattatgtacttgtcctctcttcttacctttttgaacatcagaagttcaagaagtatacgttcttattttactaattctttaactttagctttcttgccgacgcggtctctcaggtagttcagttttgctcttcttactttacctcttcttactacttccacccgctcaacgttcggtgaatgcagcggccatgtcttctctacgccgatcccgttagaattctttcttacagtaaacgtagctcttgctccgccgccctgtttcttaagaacagttccttcaaatacctggattctttctcggttaccctctttgatcttaccgtagaccttaaccgtatcacctacgttgaatacaggcgcgttttctttcagctgtccagcttcaatatttctgataatatcattcattatgtgtgacctcctcgtttacttggacgttcttaatacatttgtatcagaggaccatctcttttcttcacaacatgctatagtttatcatattatgtgaagttttgcaagcatttatttatattatgggcgctgtcccatgccgccttcaagcgtcagcgtctcaccggacatatatttgaagtcaggtgaaccgagatgtacgcatacgcggccgatatctttttccggatccccgaaccgtcccatcggaaccgctttcagatttttctcatatgcttccggataagcctccttaaagttctcaagctgcgccgtcattgccaggggacacacgacattgacattgatgttgtcctttccccactctgtcgccgcgacccgggaaattccgcggatgccttctttcgccgccgcgtaagagctctgtcccgcatttccgaacagccccgcgccggaagcaaaattaatgacagacccctgcgtctccttcagatatggataacaagccctcatgtaatagaacaccgcgtaaagtcctgagtagatgccaaggtcaaagtgatccttcatgtgcatggacaacgggatccctgaagcagacgcctgagcgttattgatcagcacatcgatccgtccgaaggtatccactactttctgcacggtctccttcacaacttcctccgatttctcatccggggtcacatctgcctgcagaggcagcaccttgatcccataaagacgctccagttcttctttcgcatccagaagtttctgttcgtttcttcctgtaagcgccagattcgcgccctccttggcatacgctacggcaataccgtaaccgatcgatcttgcctttcctccgcccgttattatagctgtttttccgtcaaatatacccatcttttctgtctcctttccttaatagaatttatagtatgtggtctttatactctgatccaagaatggctcgggcgagttctttttctttttcgtcaagctctgccttttcaagcagatccggtctgtttctcgccgtgcggataacggactgttcccgtctccacttctctacgttggcatgatggccggacagcagcaccggcggcacctgttttccatgccagatctccgggcgcgaatactgcggatactcaagcaggctgtcctgaaagctgtcaaactctgccgacacgtcattgtgcagaactcccggcacgagacgtgaaaccgtgtctactacgaccatcgcagggagttctccccctgtcagcacataatctccgatggatacatagtctgtcacgatctcctccagcacccgttcatcaataccttcataatggccgcacagcagcaccagttcttcctccctggcaaattcttccgccatctcctgatcaaaggtcctgccctggggcgacatatatacgaccctcggtgttctgcctgccttttcctttatcgcgctgtatgcctggaagaccggctccgcctgcatgagcatgcctgctcccccgccgtacggataatcgtctacactgttgtgtttgttgaatgcatagtctcttatattgaccgcttctatctgaagcagttctttttccatcgcccgcccggtaatgctcgtactgaggccgttcatcaccatgtcgggaaacaatgtcattatataaaactgcattatataagcccctccatcaagtgtatcgtcatcattccctgttcgatatctatattctgaatgcattcacggatcgcgggtacgagcacttcaccgtgagccgggctgtcgatgacatacacgtcgttggcgcctgtctccatcacatccgccagcgtgccgaacagttcgccgtcctctgtctgaaccttcatgccgagcatgtctgccacaaagtattccccgtcctcaagcggcacggcatcctgccgttccacaagaagtgcgcatcttttataccgttctacatcatttatattatcaatgcccttgaacttgagaatgacgaactgtttgaagaatttgacattctcgatctcaagctgcagtgtgtcttttcctgtgtccaatatcacttgcttcagcactttgaaacgtcccgggtcgtcggtcgtcggaaataccttcacctctccacggataccgtgggtggatgtaataactcccactttaagcatcttttccatctgacttctccttatcagggggctgtcccttttttccgtacaacggcaaaaaggaccagaaccctgcgtgaacaggggtctgacccccaaaattaatccattatatctacgattacttttttatcttcttttgccgcagctgccttcacgacagaacggattgccttggcgatacggccctgttttccaatcacttttcccatgtcggaatctgctacatgtacttccagaacagttgtcttcttatcttcccgctcggtaactaccacgctgtcaggatcgtcgacgagtgccttcgcaattacttccactaattctttcatgctatacgcctccagacttcagcctatttttcaattccggctgctttgaagatcttgttaacagcttctgtcggctgtgcgccagtgcctaaccacttcttggctgcttcttcatcaaccttgaatacgcttgggtcctggttcggatcgtatgtgccgatctcctcgatgaacttgccatctctcggtgaccttgcatctgccacaacgattctatagaaaggagccttcttctgtcccattctctttaatctgatttttactgccatctgtttcacctccacttatctctttaaattgatctataggttaaaaaggaagcctgaacttaccttttttcccaccttttcccatcatcttcatcatcttcttcatctcgccaaactgcttgaccatgcggttcacatcactgatgtccaccccggccccttttgcgatcctgtgctttcttgaagggttcagaagatctggattgcggcgctcttccaatgtcatggaatatatcattgcctccatacgcgccatattcttttccgcctgagctgcctgctcatcatcgagccctttcatcctgcccattccgccgagtcccggcatcatgttcataatattccccaggccgcccatgttcttcatctgctttgtactctccagataatcttcaaaatcaaactgggctttcttgagcttcctgctcatctctatcgctttcgcttcatctatctcggcttcagccttctcgataagggtcagtacatctcccataccgaggatacgggacgccatcctgtccggataaaactgttccagatcagaaagcttctcccccatacctgcatataaaatcggtttgccggtgactgcctttacagacagcgcggcgccgccccgtgtatcaccgtcaagctttgtgatgatcacaccgtcgattcctatcttctcattaaaatcagaagctacattgacagcatcctgtccggtcatggcatcgatcacgagtattgtctgatggacgtccaccgcctccttgatctcctgaagctccgccatcatatcctcgtcaatatgaagccgtccggccgtatcgaggatcacaatattattcccgtttttctgcgcgtgcagaagcgcggctttggcaatgtctgacggcttgtggctgtctcccatggagaatacgtccactccctgcttctccccgtttacctgcagctgtttgatcgccgcgggacggtatacgtcacaggccgcaagcagcggcttctttcctttcagcttatactttcctgccagctttgcggtggtcgtcgtcttaccggcaccctgcagacccgccatcatgatcactgtgacagcgctcccgggctggagcttgatctctgtcgtctcagagcccatcagcttcacaagctcttcattcacgatcttgatcaccatctgccccggattcaggccgttcatcacatcctgcccgaccgctctttcctggacattcttaataaagccttttacgaccttaaagttgacgtccgccgccagcagtgcccgttttatctccttgagggcttcttttacatcatcctctgtcagacgccctttgcttcttaaattcttaaatatattctgcagtttttcagtcaaactatcaaatgccatgctacagctcctctataatctcatcagatatcttccggatatcggccacaagctcctgcggctccctctccttatatccgtccagcaattcatcgatctgctttactttttccttgatactgacgaacttctcaacaagatgcagcttgtcttcataacctttcagcgtacgtccgcatctctttacgaggtcgtgcactccctgtctgctgatgcccgcctcaaccgcgatctctccaagcgacagatcttccagcacaaactgttcgtatatttctttttgatgctctgtcagaagttcaccgtaaaaatcatataacaaagcctgttctaatatttcattcatgttgttcacctgtgatatcatataacaaaacgaagaaggtgtcaagtattttttcttgacaccttctttttacctctctctcatgacataatggcccagaccatccggcgcgaatatgccgccgatatacaatatcgttccttcactgccatataaaccgctttcctttgtatcataatggccatcgtagtaaaaagcatccaggaatatccggattctggacccttccggaagccgtctgtttacttcctcaacgagcggtccaagttcagcggtatcgacgtaatccatgaaccggatattctgctcctgtgcggcggcctcaagtatatatccaggtatccccgcttcgagcagcaggctccagaggcattctccattttcgacctgattgctccccacatcataacttcttccctccatcgcaaaaatatctccctctacctgtgccatgggcagttcttcccaatatgccatttcatcctcttccaaaacaggactcagcggcagctctgccgccgcctcaccctgctttatcatctccggttctatgacatggatacttacaatatagtccgccagcagtctcaatgctcccgcagtcttaaatcctacattcagcgaactggcggagcgtgctttgcttcccggaggtgactcccgtttgataacgatctgatggccgctgccttttcttacaggtctcatgccggcctctctcataaatctttcttccgaatccagtgcaaaaccgctgtatttcggattatatatcagtgcacctgtaactgacggcaacagcagtatcttcacggtaatctctctttcccccttttcctgcatacttttatgccccggttctgagccttccgtgagataccttatattaggcgcaaagtacttttctcctccttttctcccggtcttaaacgtgaatacaggttttcccctgctgccggctgtactgcacaggccggcatattcatcagcgctcatagaacggtataacgtcagcaccggacctgaatatcttttgaacaccatgttggcaggatatatggttccgcaaatctgtaaacgcccccacatgagcggctcttcctcatccgcttcctctgggacgcctgattcctctgcggcctctgtatcttctgacatccgcgcagattccttctcctcttcttccacaaggtcttctctttttaatctccgggcaattatattatggaatactgtttcactttccaaatcctccccatcatcaaagatttctttgactattttcccgagctgcgagtctatcttagacatatctttagatttcagccattttgccgctgctgcgaaaagcacgttttcactcctgtactcagcgccgccaattttcatccactgtatcacagcgctgtaatgactgtttatatgaggtttcctttcttctctctttttctcaatatattcgtacatttcaccacaagctttcccggggtataccgcctttttattcattataacatatgattcctcctcgtgaacagtatgacagcggccgctgttctttatgacagtcttctgcttccgagaaactccggaatactgatccttccccatccctgcgactcttccatccgcttacagctctcacgcagtctcagcttcacctcaacattggacatgtcgctgtacttggacaagagcagcgcagctgcccccgacacgaccggtgttgccatggaacttccgcttttgaccgtgtaaggcttctgtctctttatgccaaaccggctgttgcacgatatgatctgatctcccggcgccaccacgtccggctttaccacacattcatgcgtcggtccgcagccggaatagtaacttaccttttttactccgtgtgatactgtgatatccgaagagcccacggttattatcttcttactcgttcccggcaccgacaccgtcccttcccccggcccgtaatttcctgctgaggcaaccacgacaagcccggcatcccacagctgctccgccgcctgctccagctccttccccttctcatcttcaagacccaggttcgctcccacggacatatttacgacccggatgtcatatgccctccagttttccagaagccactgtatccctctcagaataccgtcgaccgtcccttcccctcttgcatccagcaccttgacgctgacaaggtccgcctccggtgccatacctgcgtggagaccgcgggacattctcccgtttccgccgagtatccccgtcacatgtgtcccgtggccgttatcgtcatacattcggccgcggccgcccacacagtctttaaatccccggatcctgtctctgaggtccggatgcgggacaatgccggtatcaagtagcgctatcccaacatgctttcctgtatatttacctgaaacagtgtcttcacacctgtaatctatcacatcttttacatgtttcatgattcttttaccctttttctattaagatattcagaatctgaaattgatttcttccatattttgtcgtaagatataatagattctatatccatatataacttaaggggaggatattatggaaaaccggaattattatgatatattaggggtttcaacaaaagcggcgccggatgagatcaccgccgccaaaaatgcactggccaaacaataccatccggatgcaaacataaaaaacggaattgacacaacggacaaaatgcaggaaatactggaagcgtacaatatattgtctgatactgtaaagcgtgcggaatatgacagggagatcagcgggcgcagacaggatatgcagacctttgacctgaaatccggtgcttccggccaggaacagtcagaagaagagacttttgttacatattggaaggctgccggcgccctgtacgagataatcatggaaagcaatgaactgttccgtcagaaggaagagacaagcagactggcccagctttccatgcaggcgctgaaacatatccttatcctgaaagacgcctccataccggagaaatactggcatcccgacattatgaactggctgctctttacatggtataaaaacagaaacatgacggtcgcctatctgctcaccatgtatgacgaatatgtaaaaaagagtgcctctcccgtggaaaagctgaaattgcagggtagatcccaccggtttcagcactcggtaaaaaggctcataaaattttaaaatccaattgtttcacacatcagcaccccccgcatattatgtagtgtaaataacatatatggaggctttcaattatgagcgatttaagtgcaacaaactgcggatgtggttgtgaatcaagatgtggtggagactgtggctgcggttttggcggcaacagctgtatctggatcatcctgttactgtgctgctgcggcggcttcggcggcaacaacaatggttgtggcggcggatgcggcaatgacagctgtatctggatcatcctgttactgtgctgctgcggcggcttcggcggcaacggcggcggatgtggctgcggcaacgactgcggatgcggatgctaatctgacattataattgaatatggaaaaggctgtcacatagcgtggcagccttctttttattcgtacgggataacagctccgtcatacttttcttctatatatttctttatatcatcagatttgagcacatccaccagcgctttgatgcccgctttgtcttcactgccctcttttacggcaatgatattaacatatgttctggcggcttctgaatcagatgtctcgtatgccagcgcgtcttttgccaccgagtatccggcttccagcgcatagttgccgtttaacaccacgtaggcagtctcatccacgactctggcgatctgtgccgcctcaagttccacgatcttcacatcgcaaggattctcggtgatgtcgttcaccgttgcattgagtcccgccccctcttttaaggtgatgatgccgttatcctgcaggagcagcagcgctcttgcctcattcgtcgtatcattcggcacagctatgctgtccccgtctttgatatccttaaggttcttctttgtgcccggatagatgccgaacggttcataatgtatctcgcctgctccggcaagatgtgttcctttttcttcattaaagctctcaagatacggcgcatgctggaaataattcgcgtcaaactcaccgctctctactacctcgttcggctgtacatagtcgtcaaacaccgtcacttcaaggtcataccctttgtccttaagcagcccttcagcttctttaaggatctcagcgtggggcgttgcggaggcggcaaccttgatcaccttaacctccgtatccttcgcctctgctttgctcccgccggattttccgcagccggacagcacgcctgctgtaaggacgcctgccagcacaactgatactatcttttttgtcttaattcccttcatcttcatttcctccatttttattttcttttatctaaacgggaggcaattgacatgcctgccgtctggaacaactgtactaatataacgagcaggactacagtagcaaacatgatatccgtctggtaacggtagtacccgtatcttatggctatatctccgagtccgccccctccgatcgttccggccatggccgagtatccgagtatggtcccaatggcaatggtagctcctgtgatgagcgatgttcttgactctacgagaagcacctttgtgacgatcctcatgttcccggcgcccatggctcttgcagcctcgatcactccctcgtccacttccgttatggaagattccaccatcctggcaataaacggaaccgccgcaaccacaagcggcacgaccgttgcagatgacccgtagctctgtcctgcgaccacgcgggtgagcggaatgagcaggatgagaaggatgagaaacgggatgcttctgacgatgttggctgtcacatcgagtatcttgtacaatatcctgttcggctttatcccttcttttcggctcaccgccatgagcactcccgccggcagtccgaacagatagccggcgccggcggacaaaagcgtcatataaagggtttccatcaatccttttagtatcataagaataatttcactgtcccacatcttccgtcacctcctccgtctccagtccccgctctgacatatacgttttcattccttctatattaatgctgcccggaacaaattccagtatcatctctcctttcgccactccgcctatattcttcgtgtccgcccgcagtatattgaccggttcccggaacttcaggatcatattggctatgaccggctcaaaggcggaattttcagaaaagacaactcttatctgtctgccgctgcggatcttttcgttcagcattctgcttcttctctgtgtatcctcccctctgtcgctgaggataagttctctcgcggccgctgattcgggatgggcaaagatatcttccacccttccctgttcctccacctgcccctctttcataactgctacgtgagtgcatatttctctcacgaccgccatctggtgggtgatcactacaatggtgatcccgaaccggacattaatgtcccttagaagttcaagtatggatgacgtcgtctgcggatccagcgcgcttgtcgcctcgtcgcagagcaggatctcgggatccgaggcgagcgcccttgcaatggcaactctctgcttctgtcctcccgataattgggacggatatgccttctgtctgtccccgagaccgaccagttccaacagttcagccgccctctgtctcgcctctttctttttcctgccctgtatgtacagcgggaaacatacattatccagaacatttttctgcataagcaggttgaaatgctggaatatcatcccgatgctctctctctgtctgcgcagttccttttccggcagactgccaagagactgtccttttatgagcaccctcccctctgtcggacgctcaaggaagttcatgcacctcacaagcgtgcttttccccgcgccggacataccgatgataccgtatatatccccgtctccgacattcagatttacatgtttaagtgcttccaccgtcccgtctttcgagcggtatgttttgcacagattttctattattatctctgacatctcatcaccctctgcactgctgattttgttgatattgatactatatcactctgccgggaaaagtgttaattcataaaaaatacagctggctatagcataaagctatatccagccgtatttataagtttaatcctatcgttaaccaagcgctttatcctggaattttgcgatctcctccagatatttctttccgagaggactcatattcacgccttttctgacaagatatccgatggacatcttctcgtttgatgaaagctttaccgtacagtagtcggaaccgtacaattcttcacatatgatgcccgagcagagtgtgtatccgttcagtccgaccatcatattcaatatcgtagctctgtcatttaccttgatgatccgcttatactcatacgagctcagcacctcttccgcgaagtaaaaggaattataattcccctgttcaaacgacaggcacggatattcttcaagctcttccagcgcgatctccgttctgcccgccagcgggtgtcccttccacataaatacatagatactgcacttcagtatctcatgaaattccaggttaaattcatggaacagctttgtgagcactttgcggttaaagtcattcacataaagcacacctatctcactccggaaattctttacatcttctatgacctcatatgtctttgtctcgtgaacggcaaactcatactcgtccatcccgaactgctttaccatctccacaaacgcgtgaacggcaaatgtgtaatgctgcatggagacgctgaatttcttttttgttttttcttttgctatgtatttggcttctacaagttcatactgttccacgacctgtctcgcatagcctatgaattcttccccttccggcgtaacagacactcccctgttcgtcctgcggaaaatatctatcccgatctcatcttccagttctctgacagccgtggaaagactcggctgtgatataaacagctgcttcgccgcttcattcatagaactggcatttgctgcagtgatcacatatttcagttgtgtaagtgtcattttgcttctcccggtctctttttttgatacatgttatattttaaaatataacatgtatcaccggacagcgcaattccactctgtctattactttccgttaccgtctttgtcctttttctttccggtcccctcttctttttcgtcttctttgccgtccactctgtttttcaacatgcagtcctcgtctatctcatagattgcattcccgtcaatgatcaatttccggttcatgtgccatatccctcctgttcgattactcattgttattatatggaaaatgttgagattagttttcccggttttcatatttttactcttcgccacatatatatttacaacgttataaaaaggagtgcttatggaacataaacctccaagacccatgactccacttgacactatggtgactcctccttatctgtatacactaaagctgatgcttccatacactccttcttctaaccagaggtttctcgccatatacatcaaatttctggaattccgttatacgatggatcattttcacggcttcccggccagaagttcttcaaaagactcccggcacggctttgcgcctatgggcatgtttgaggacctgaaaccatacatggctccggaagaaaaagaaatgatggatcagatggaaatgatgatgaatatgatggaaatggtccagagcactcaggcagcggaaggcggcggcaacggcgcaggcggctttgatcccatggatatgatgatgggaatgatggatcctgagcagcaggaaatgttccagacttacagcaatatgttcgaatcggacatggcacaggcatataataacagtaacgaaaaacccaaaaaagaaggagaagaaagcttatgaacgaatggatgaacaatccggccatgaagaatcttgacccgctgaaactggagctgatcaagacggcagccagacagaccgaaggaaagaccggaaagagtctggcccccgtgctcatggccctcatcacaaacgcgaacaaaaaggggatccagttctcaccggacgagatcacgctcatactggaaatgctcaaagaaggaaaatccaaacaggaaaaagaccagatcgaccagatgcttaaaatggtaatgggatacattaaaaaataaaaaacagtgcagggaacggatctcttcctttccctgcacatttttaaaacccttcttcttttctcatcatcctgatctctcttcttttcttggcccgctcccattcttctctctcttcatcattttccaggataagccttggcaccggtgtcggatgatcctctccatccagcgccaccatggtaaaaaacgcatgattgataggcgtgcgttctccgtccagtgattccacatagctgtcaacctttacttccatcgaagtctttcccacgtatgtcacctttccgatgattattataacatctctctggtaggcaccgcgcagaaaccggagattatcgacagatgcggtaataacattcattctcgtgtgacgctttccgacaagccccgccacttcatctatccactgcatcagcatcccgccgaacagacgtcccgctgcgtttaagtggtttggtctgaccatatggacggtctcgaccactgattctgatactcttctgctctcagctttcatttatgacactccaatccacattctttggcaagttccgtatagtgatcaagtattgctttatcctcgcagaatatcggaaattccatcttataatttccccagatcgtcacttttttatgagcaaaataaaaagtggaaaacagccattctctgaccgtgacctccaatagaaatttcatgatctccccgtccagacggtaataaatgtgccctttgtcagtttccatcttcccaagaacagccagctgccggctgtcaagaccaaagcagaatatctgtttctgttcctccggaagaaccggataataaaagtcagcgtaggcggcgtccttattttccgacagcacccgttcaaaaaacgcgctcattttctcttttccgtccgcgcgtattattgcagcctcatacttttcaaacgcctctttcaccgtttcagcacagagacagtaaaggcgcatgaattcctcttttgacatggaacgtaccatgtgcattcccctttcttctgcaactttcacattttcttgccaagcccttttattatatcataagatttggtatacttaaactaattttacatgtactggattctgtacaacacacggtgggaaggaacacagtttcgcacgaacatatagacatatagcagataaggagcgtaaagcgtatgaggaatattcgattgacaatagaatatgacggaagccgttatcagggatggtgccgtctcggcaaggaggaatccaacaacacggtatccaataagatcattgaggtgctgcgcaagatgaccggcgaatatatcatcgagctgaactgcggatgccggactgaagtgggcgtgcacgcctatgcccaggtggccaattttaagacagactccgatatggatattctggagatcaagcactacctgaaccgatacctgccgatggatatcgccatcacaaacgtagaagacgtaccggaccgttttcatgcacagttgaatgccacgtcaaaaacatatgtataccggatgaccatcgacgatgtgccgagcgtatttgaccgcaagtatacgtaccactgttttaagattcctgacaagaagcttatgcagcaggcgtctctgctgttcatcggcaagcatgattttaaaaacttttccacagtgaaaaaaaataagactaccgtaaaggagatcttcgagatcgaagtatacggggatacggaagaaatgcagatcctcatacacgcggacgattttcttcacaatatggcccggctcgtcgtgggcacgctcctggagatcgggttcgggacgagaaaaaaagaagatatcgaggagatctttgcgggcacgaaagcccccagctccccttgcgacgcaaaaggactgtatctccaggaagtctcctactagcagacgtgtcggcgttaaaaaggacgcagataacacagattccggctactccggtatctctgtcatctgcgtcctttccgctttttcctgctgcccgccggccataaaatacaggccgccgcagactgcagttccataagatcttacccctgtacgacgcctttcttaagcatgacattggcatacagggcgccctctcctgtggcgatgacggcgtatgcttctcccgccattttcataaattcctgtttctctatattttccacgactgaatcgccccgttcctcatgctttccgatgatgactttatagatatcccagatcggcgtcttcacatcttctccttccgggaccttcatgaggctgaccggcttgtctgacgaggcgtccagaggaaacagcttaagtacggcatccaggatctcaggcaccgtatgaccgtcacaccggatcacgatgccgttcttcccaacagactctgcggggaaattcccgtccgcgatcacgatcctgtctccatgccccatctcacttaaaaccttcagcagttcaggggatattatttttggaatgccttttaacatatgttctgcctctcttcttccgggacaatttctatccagtatccgtccgggtcagcgataaagtagactcccatctccttattctcaaagcagatgactcccatcgctttatgtttttcgtacattttaccgaaatcatccactgtaaatgccagatggaattctccctcacccaggttgtacggttccttcctgtcattcagccacgtaagttccagtgtaaaaccgctgcttccgtctccaaggtagatgagtacaaacgcgccgtccggatccctcttttcttttacagggacgagatccagcgcctctttatagaaagcaaggcttttttccagatccagcacattaaagttaaaatgatcaaacttcaccatacaatactccctctacttactctggctgctcacgtcgaggtagaattcatacgcctctttatccgtagcccctttgtgtacgatcatgttaacagcctgggccatcacttccggatgggtgctctggaaaatatttcttcccatgtccatgcctgatgcgccttccgatattgctttgtaacagagtgtgagcgcctcattttctggcagcttcttgcctcctgcaacgacgatcggtaccggacacgcggatacgatctcctcaaagtcttcgcaataatatgtcttgacaatatgggctccaagctccggcaggatccgcgtagccagcttgaagaatctgctcgtgcgctccatctgttttcccactgccacaacgcccatcgtcggaatattgtatttcagtcccgcatcaactgttttacacagattttcaagactgtccttctctccgtccgcgccgataaatgtctgcactgccatacagcttgcgtccatcctgaccgcatcctcaatgctcacgccgatcacctcatggctcagatcctcgtccaccatggaagagccgcagctcactctgagcgcgatacccttgttgttctctgccgggatacatgtgcgcatggcgcctctcgtccccatcagcacgtccacgtaaggcatgagcggcgggatcaccaggtcgagcctctcaagccctgccgtagaacccataaaatatccgtggtcgaacgcgagcattaccgtatgtccgctctccggctggaagatcttggacagccgcttcttcatcccccagtcaacgtcctgcattccttttacatgaaatcctccgtttttcgcaaacggttcattcacatgataattttttgccacctttaatccatctacatctgccataatcttttttgtctcctccttaatctacgtaatacacgcaagcccccctgcgcactgcaaaaggacttgcatgtatgtgaaatgccactgccttgaacggattatttagaaatcataatcatccatgttgtctgcgttaaactcagcgcgttctggaaggaatacgactcctgaaccgtctacattgtcagcgtcatcccctgtgatctcgctgttgtttacgatctcaacctcaccaatttcaggaatgtcaactttgtcgccgatcgtcactttgttgcctgacgcaaggtaataagccatgtagttgacgatagaaccctgtaagcctgtatcccacagtccccagttgttcactacgcctgccgtacagaagtctttcattgcgttcggtgtggcaaagcctgtgatagcaacatcctttgttgtctttccaagattctgggctgcctgagcctgtcccggaagtgctgtagaatcacagcagataacaaggttgatatcctcatgtgccgtcagtacggattcgcctacagagatagccttttcagcatcctgctcactgtagtaattatccggagctacattttcccagttaggatacttctcggcgatcatctcttcagctgcatcatgccatgagttctggtctgttacagttgcctgtgaataatgccagcagtatttgaccgcgtcctttgcaggatcaaggcctgatgccttcagtgcgttctcagaaagctgaagcaggaattccccgaggatttccggtgagccctgagataccatgatctgtcttgcatccgcagaaacgtcagaatcccatgttactacagccagcccggcgtccatggctttcttcataacttcatcgagtccggtggcatccacagatgataccgcgataccgtcagcgccctggttgatcgcattgttgatgatagttacctgatctgcgaccgcagctgtcgcactgccgtcgtacttgatctcaaatccgccgacctttttcgcaaattcctgcgctccgtcgtttgctgactcaaagaaagagtttcctgtaacctttggtacaaacacgatctggagatcgtcccctgatttctttgtgtcgcctgaatccttactgtcagaatcagaaccggattttccacaaccaactaccatagtagcgatcatggctgcacataataatgcgctgatgagtttctttttcattcttttgtcctcctttgattttttattattataatcatttataataatcccttttaaaaccggcagccgcttatctgcctctgttctttttcagttttgccagcagctttttattcccgcttcccgtcatgcggaacgcaagaacgatgatgagcaggatcccgaccggtatatcgagatactgtgacgccatgcccgacatgttaagtccgaatttcaatatgccgatgacgcatgctgccagcgccgtcccgatgacgcctcccttgcccccgaggtttgacgttccgccgagaactaccgcagtgatgataggcagtgtcagcgaacttccaaggtcggacttggcagacccgagataactggtgagcacaacgcccgccagggccgcgctcataccggacagaccgtatgtgctcatgatgatcggccttacccggatacctgaataccggcatgcacttgaatttacaccgcacaggaatatataacggccgtactttgtcttgtgcagaagtatgtatgcaaaaatcacaagtatgataaatattatgagctggttcggtacgcctcctatatttccggacgaaagtttcatgaacgaggccggaaacccgctgatcccttcgtaggcttcagatgacgacatattgacgaccgcaagcgcaagccccgaatagaggaacgaacctcccagtgtgactaccatcggctgaactcccgtatatgccacgaaaaatccgctcaggagaccgcacagtgtccctacaagtatactgacgagcactgccgcccacacgttgaagcctttgtcctgccagagcagtcctatcgtaatggatgtcaggcctacgatggagcctgcctgtatgtcaattccgcccgtcaccattacgaaagtgacaaacagagagatgatacatatagagataaagtcattgatacttcccatcagtacattcaggcgcaggaatcttggattgagctgcccgaatacgaggatctcaagaagcagtatgacgatcaaaaacatttcccagctgaagaccttgctctttaaccctttcatcttattcattaatagcacctccctcagctgctgtcactctggccgacagccgttctcttcttgccttttccaccgaccttctctgtacgagcgcatccactactacgatcacgatcagaaggatgccggtgatcgtattgtcataatcagaagaaatcttcaaaaatacgagcagacggctgatggacgccatgatgataccgccgatagacgcacctattactgtaccaacgcctccggtcaggctgatgccgccgatcacacacgccgcgatcgccttcatctcatatccgtttccggatatggcagtcacgaaacctacacggcttacatagaggatcgccccgaacgccgcaaacagtccgcacgtcataaatgctttcatctttgtagccagtacaggtataccgatcaggttcgcgccggcctcgttgtctcccacggctgcaaaccgttttcctctttttgtttttacgaggaagaggaaaatgagcaccatgaccgccaggtccatcacaaaaaaccagctcaggttaccggccacatttttctgcgccagctgtttgaaaccggacggaagattctccacccatttgccgcctgtgtacagatatatgagtccccggtatataccgttcgtgccgagcgtcatgatgatggacggtatcttcagcaccgtaaccccgatcccgttgatcgtcccgcacacgagacctaccaggatacagagggcgatcgccattccccaggatgccccttccctcaggtacgtcgcacagacagccgcggccagtccgagctgcgccccgatggaacagtcgatctcccctgtcaggatcacaaacgccattcctatggcgataagtacatatacgatagaaccgttaaagcaaagcagtatattctgcggcttcaaaaagcttggattcaccactcccactagcagaaacatagctacgagacagagaagtgaggacagctctctggccttcagcgctttttttatcttctccatgattactctccttcctcatacactccgaatgacgccgctgtcagattatcaaggtcaatcttttctcttgtaaatgtatgattgatatgtccttggtacatagacaccgctctgtcactcaactctacgatttcttccagatcagaggatatgagcaaaatcgccactccctgttttttcagttttcctatgatagagtacacgtcaccgcgcgctcccgcgtctatacctcgtgtcggctcatcgagtatgatgaccttcggattcgtcgacagcgctctggctataacgcctttctgctgattgcctcccgacagtgagcccatgatctggtcctgtccggttaccttgatacggaaatcactgatgtactggtccgccagttcttcctctttcttacggttgagaaagagcctgctcatattccgtatctgggcagatgagatattccatcccacttcccttatcttaaagattccgttcagaaatctgtcttccggcacataattcacgcctttatccagcactctccgggtgctcaggcctgtgatatcttcaccgtcaaggagcacttttcccgatttcaccttgtccatgccgaatattgttgttgcaaactccgtcctgcccgcgccgacgactccggccacaccgaggatctctcctgcgtatacttccagattcagattgctgaacccgtacccgctgaagtccttaagttccagcaccggttctgccgacgtatagtctatctctactctttcaccggcagttttaagttccgaatccggaggcagcagcgccttgacaaggtggctcttttcaaactcactcacctcgccgctcagactcacgacaccgtctctcatgatcgatacgtgtgttgcgatctggaatacttccgtcagtctgtgggtgatgtagaagataccgatatttttctgtttcagttcttccaccagcttaaataaggattccgcctcattgaagctgagcgacgacgtcggctcatccagaataagaattctcgcatttctgagcagtcctttcaggatctctacgagctgctgctccgcgatcgacagcgtattggcctttctttccagcttcagatcccatccgagatgttcgatcatctccaccatccgcttatgtatctcacttttcttttcgtcaaaccccattgcgacgttctcttccactgtcatattcgggaagagcatcggctcctgaggcacaagatatataccattggcaagcgccgtcgaagattttgagatatccaccttctctccgttgatatagatctcgccttcgtcctgctggtaaatacccattatgatcttcataagagtactctttcccgcaccattgcctccgatcagggctatcacttccccttcacgcagttccatgttaatccccttgagcacctcgttggagccaaaggacttacgtatatccttcaccttgagcaatgcctcgccgccggatctatttttaacaccctgcatgtctgcacctccattccagttagttgcgaagtttaacttttgttcttatacaaaacaattgttaactttcatctctgtgttgccacaccggtataccgatgttctgatttagtttcataatacatttccgttcacaatttgtcaacatgtttgttgtccatatttgctgttttatacattatagttataattttatacgtttttttatgcattttgccttaacattttacaaaaaagataaattctgttcacgaattaaattgacagtatccctggatgctgttataatttactcataaaacatttgcatcataaatttacttttgtacacagtaaattacaaaaggaggatactatgtctgataccagttccgataacaatacacaatttgaaaaaaatttactttataaagcttcctggtactattatatggaaggtcttacccagcaggccatcgccgaaaagcttaatatttcccgcatcaaggtgctgcgtcttttggaccgggcgcgtcaggaagggatcgtgcagatccatatcaagcccgacacagatgaatttctctctatggagcaggaactgatccacaagtatcatctgaaagactgctatattgttcccgcaggctccggcaaagacaaccagaccgagacggtggccaaggccgcggcaatgtatattcagaatcacattaccgacaactgctatatcaacttcggttacggcgagacggtgatgcgtacgctcagtcatctgtcgcgctgcgtctcagccacgatctccctcgtctcactgaccggagggatcaccaactacctgcccgacgctcattccaggatctacggggccaagctttacctgtacccctctccgctcattatgtcctcaaaggagcttgccgcctctatgatggaggaagcttctcttaccgagatatccaagatgaccgagcttgccaatctcaccctcataggcatcggaggcatgaatacggatgcgacgatcttaaagtcttcacggcttaccaacaacgattatcttcttctgaagatgcagggcgctgtgggagatctcatcactcattttatcgatgcccagggccggctcgtcaactcagattttgatgcgcgtatcatcagcactcctctggaaaagctgaagtcgctcaataatgttataggcgccgccaccggcgttgaaaaactgcctgctatcgccgcggccttaacaggcagctacctggatatcctcattaccgatgatattacggcaaagcaactgttaaacaattattaatattttaaggaggtctttactatggcaagttacttaatggcacttgatgccggcaccggaagcgtccgcgctgtcctatttgatacggccggcaatcagatcggtgtatcccagcatgaatgggaacatctcgaggatccgcgttatcccggctctatggatttcgactggaacaacaactgggcgttaaccgtacaatgtatcaataatgtgattcgtgatacgcacatatccccttcggatatcgcggccatatctacgacatgcatgcgggagggcatcgtcctctatgattccggcttccgtgaaatatgggcatgcgccaatgtggacgcacgttccaacgacgaagtgtccgaactgctcgcacagtctgatacgctggaaaaagaaatttattctgtatccggccagacatttgcactggacgctgtaccgcgtatactctgggtgaaaaataaaatgccggaactgtatgaaaaaacggcttacgtaagcatgttcaacgactggctcatttacaagctgaccggtatactggcatgcgagccaagcaatggatgtaccaccggcatatttaatcttgccacaagaacgtgggataccgatatcgccagaaaatgccgcatccgggatgatatctatccgccggtacaggaaagcggtacagtcgtcgggcatgtatcacccggcgccgcgtcacagaccgggctgtctgaatgttccgttgtcgtcgccggaggcggggatgcccagcttggctgcatcggcgtaggtgtcgtcgccccgaagcaggcagccgtattcggcggaagcttctggcagtttgaatacaacacagatacggtaaagaccgatccggactgccgtgtgagggtgaactgtcatgccgtcccgggcatctggcagtatgaagcgcttgccttctatcccggtcttgtgatgcgctggtaccgggatgccttctgtcagctcgaaaagcaaaaggcggaggaaaccggcaaagacccgtactattatatgaatatcgaggctgaaaaggtaccggccggaagcaatggaatgctctgtgctttttccgatattatgaattacatcaactggaaacacgcggcccctacctttaccaactttgctctcgatgccgaaaagttcaaccgttacaccttctaccgggccattatggagaattcagctatggtcacacggggcaacatggagctcgtcgcttccgtgaccggtgaactgccggaagaaatcatatttgcatccggggcttccaaaagtcctctctggtgccagattttgtccgacgtgcttggtataccggtacacgtaccgaaagtacgcgaggccaccgcgctcggcgcagccatactggcaggcacaggcgcaggtatctacaaagatatacgccggacggcagaggaactctgtcatatagagagcacttattatccggacagctccaaccatgatacatatgacaacctgtataaaacctggaaagaagtataccgtgcccagcttgagctggccgacagaaagcttaccaaaaacatgtggatagcgccaggtttataatattttaataaggaaaggagatatacataccatgttcatcatcaatgaaaacgaaaaggaataccgcttcggtgacagcggcccgaaatatcttatgaaagggccgcggagtaattttgccgttgtacagtttaatgcagggcaggatttcaaggctcattaccacaatattatggaggagaacttcttcatccttgaaggcgaagtcgacattatcgtcgacggcactacccatactttaaaagccggggatttgatacatattgaaccggaagaggtacactatgttgtcaacaactcctccggcacggtaaagatgatctcaacacttgctccgtaccaggaatctgacaagatcgaagttgactgatccatatgctgcagaatgtcttatgtacagacattctgcagtttcttttttatctttcctgtgacacatattcatacatggctttcataatgatccagacacttgtggcgccggcatcctgaaagccgatcgtcgtcccctgtgtctttgcccttccgaactttgcctcgaagtttttcgtgctctttacacctttaagcgctgactcctgcgctttttcaagcatggccacaaatccttcctccgcatgcgcgagcatagcgtcaacggcaggtgaaaatgcgtctaccatcgtcttatcgcccacctctgccttaccccgctcttttatgactgccaggctgttcttcatcatgtctgcaaattcacctgcactgatctgtccggcgggctccatgccttttgcaccgcccataaacatacttccgaatatgacgcctgaggcgccgcccatgctcatgagcatggccttgcctgccgccgtaaagaccgcgtacacatcggccggctcttccatcttcagcagcttatcctttgctttcttaagtccgcccgccataccgatcccgtggtcaccgtccccgatagcgctgtccacttccgtgagcatcggttttgcctctatgatacagtctgccacataaagaagcatctctttcgcctgttgtgcatttattctttccatgacgtttactttcctttctttgcatagtacggacaataacacggcatatcatacagttccctgagcgtgtcatcaagcttcaaaagtgagatagagaaccctcccatctcctgacaggtacaatagctgttgatatctgcatcatgcaccgcaatgccgtccgcatcgagaagtgccttcagcttccggtatgcaatgctcatctccagtacagtcgtactgccaagaccattgacaagcacacacacttcgtccccgtttgacagttccatgtccgattttatattgttatacaaatattctacgatctcgtctgccggtttcatcttcgtgcgctcgatcccacgctctccgtgaatacccataccatattccatctcgtcgccggcgatctcaaaagtgggcttatcaagtcccggtatctgtcccggcgttgtcgcaacaccgatgctgcgcacgttatctctcgcacgctcggccaccttgactgcttcggcaagctccattcctctgtcgcaggccgccccggcaattttgatgacaaacaggtccccggcgatgccgcgtctgtcggtcagccgttccttcggcgccgacgcacagtcatcccacactcttacgtgtgcggactcgatcccttcgtcctccagcagttcttccgccatatcaaagttcagattgtcccccgcatagttgccgtacacgaacagaacgccttttccgctctcaactgccagggcagtctcataaatggtgcccggatccggcgaggcaaacacattgccgcaggcggccgcgtcgccgaggccttcgcccacgaacccgttgaacatcggctcatgcccgctgcctcccccgatgacaagcgctaccttgtcttttctcggctctcttaagatgattccgtttacctccgggtgtttctcataataattgccgtagcaggcggtaaaaccttccatcgcctcgtctactacgtcatctgcctcatttataaacttcttcatatagtttcctccacagaacattccttataacttttctacaaactctatctccacttcgttcggctcttcgatcagcataaatctcacaccgagcttgtcactcggctcgggaccttgcagaatcttcaccccattccgggtaaatatatgttttaaaccgtcaatgtcgtccgtctccagcgcaaaatgcctgtacacaccgcggtcggtatgcgcgcctgacctgactgtgctctcaaacttgtattcgatgagttccagccggcatcctcccggcagctcatagtaatacagacggtggtctcccatatctacctcattcaacttcctaaggcccagtatccggccgtagaactgaaaactattttccttgtctgtcatatttaccgtaatatggtctattgccttcagcatccgtctcctccttcggtctttccggtctaaaaaaggtaatgtgcataaaatcatttccatacacattacctttttgcattaatcttctctcaaaggcggtgccaggaaatcctttccgacttgtaccggaacatgctttgccacaatggcttccatctcatcacactgttcttttgtaaggctaaagcctacacagccaggaataaaatctaactggtcaggtcttctcgctccgagaagcgcgcagctgacccctttttccagtacccagcgcacgctgatctgcgctacggtctttcctaatttggcagcatactgtttcagttcatctatggcggccagatggttgacaaaattctgaccctgatatttaggatcttcctccgctctcatatcaccttcgttaaacttcgtatcgacggtatatttcccgtgaagcattccgcggcagagcgcgctgtatcccaatacggtgatgttgttctcttttgcgtacggaagctggttctcgaacagcttatcctccagaatattgaaggaaggctgaatggtatgtatcggcgctgtttttctccactcatctatcatggcgttcgtatagtttgaaacaccgatagcccttatctttccttctttcaggaattcacccatgacctgcgccgtctcggcgatcggtgtcttttcatccggccagtgtacctgatagatatcaatatgatctgtcttaagccttctaagactcgcctcaagctccttcctcaatgtctcaggacgtgaatcgcggtaaacattgccgttgtcatcccagctcagtccgcattttgtagcaagcacacatttttccctgtatcccggttttgacagcgcctctcctacaagttcctctgaatgtccgcacccataagcaggggctgtgtctacaagtgtaatacccatatcaatggccgctcttacgcattcgaccgcaggttcatcgacgatgcctccccagccggaacctcccattgcccatgttccaagccctactctcgtgatctccagcccgtctacggctgttttgaaatattccataatctgttcctcctgtaatctgtattccggtataccggttgtttcttgttttaatcatataaaatcgttctcattctgtcaactgtttttgtcagctttgtgaattatttacatgacgcaagttatattttgtacattttccacaatcggcttatttatatgttccgagcatgatctcttttggtctctccatatgtgcagatatggcgttgttcactgcctctatgtcgcccgacttcatggatcttattatatcattgtgctctttcagcgtctctgccacacggcccgggtgcatcagcgatgaactcgccatgtttctgatgcggtggatatacatgccgaacatctcatcgaaggcagaattgcctgcatatgccacaagcttcagatgaaactggttatcgtactcgacaaaacggttgatattattctcttctgcaaatttgttcagcttccccataagccggtccagttcttcaaacagttcccctgctctgtctgatttcgcctcccgcgcggccagcatggcacagtagccctcgatcgctgtacgcacctgaaatgtctctacaatatctctcacttccatctcatgcagcataaaccctttactcggtatgatatcgatatacccttcctgaacgagtctctgtacggcgtctctgaaaggcgtcctgctgatgccgatctctgcggcgatcttcgtctctgaatagatctctccgggcgtaaattcattgttcaggattttttctttcatgtattcatatgcctgcatctgtagtggtttcagtaccttcatcgtggtatccccctcaatattcattctatagtaaagcatataataatttcagtttgccggtcaagtttcttctgcccgaaaacatgcacaataatagagaaagatatatggtaaaaattattaaattcgtattttttcattgaccggtataccggtatttgttatcatgatactagaatgcagattgaatttatagtagaaaggaacaaaattatggataaaattggttttatcggccttgggatcatggggactccaatggccttgaatttactgaagcatcaggcggaccttcatgtgtacgatgtcagagaatctctttcagaccgtcttgtctctgagggcgctgtcaaatcggatccttccacgatcggcagtacatgcagtgtcattttcctcatgctgccaagcggcgggatcgtaaaggaagtgttgtttggggaggaaggcgtctgtgccggccttgtcccgggtactgtcgtctgtgacatgagctccgtagcgccggaggattccctttactgctcccggctgctgcgggaaaaggggtgcggttttctcgacgcccctgtcagcggcggagaaccgaaagccgtggacggcaccctctcctttatggccggaggcgatgacgcaacgtttcaaaaagttctgccatatctggaaatgatgggttcaagcgcgctgctcgtcggggataccggaaccggcagtattgccaagcttgccaaccagattattgtaaatatgacgatagcttccgtctccgaagcatttgtctttgcgacaaaagccggcgcggacccggaaaaggtttataaggccatccgcggcgggcttgcgggaagcgcggtactcgatgccaagctcccgatgatactggagcgcaatttcgtgccgggaggcccgatctatatcaaccataaggatattaaaaatgtagtggaggaagcacatctcatcgggacgccgatcccccttacctcccagctctttgagatcatgcaggcaatgaaggtaagaggccatatgggtgaggaccactgcggaatcgtaaaatattttgagaacctggctgactgtaaagtccagaaacgcgacgattaggatgtgccggaaaggagaagtgaacagttatgaatgcagacttgttacatcagtaccctctccccgatgaagctgcagccggcagactgctggcagaggagataaaaatgtgtccggacaagatcatcgtactggacgacgacccgaccggaacccagacggtacacggcgtctctgtatatacacggtgggattatgacagtataaaagaaggatttgaggaaactggcgcactcttttacatcctgacaaattccagagcgctctccgccgcggaaagcgcctccctgcacgaggagatcgctcagacgatccaccttgtctcacagaagaccggcatcggatatctcgtgatcagcagaagtgattctacgctgcggggccattatcctcttgagacagaggtgctgaggcatacatatgaaaaaattaccggacgtgcggtagacggcgaagtcatatgtcctttcttcaaagaaggcggccgcttcaccgtggacaacattcattatgtccgctccggcggcgacctcatcccggcggcggaaacggagtttgccagagactccacgtttggatatgcctcctccgatctgcggcagtacgtggaagagaaaacagaagggagataccccgccggcagcgtgatctgcattccgctgcgtatgctgcgcggcgcggacttggacggggtggaggctcttctgctctctgccgtacattttcagaagatcgtcgtcaatgccgctgattactgcgacctgaaaatattctctgctgcgctgtaccgggccatgagaaagggaaagcgctttttgttccgatgcgccgcttccctcgtcaaagtcatggccggcattcctgacaggccgcttcttaagcccggtgaattatcccgcggctccttaaaccacggcggtcttgtcatcgtcggctcttataccgataagacgaccgcacagcttgaaaagctgacggatctttacggggtcgagctgatggaatttaactctgacctggtcggcaggccggaggcgctggagactgaacgtctgcggatacttaagctcgccggagcctgcatccgtgacggcaggcacgccgtcatctatacaaaacgcaaaaagcttatctatgccaacgatacaaaggaatctgtattaaggcgttccgttgccatatctgatgcgctgcagtcttttgcgtcacagcttgaggaagcgccttcttttcttatcgccaaaggagggatcacttccagcgatatcgctacaaaagcgctccacatcaggcgcgccacggtacttggccaggtagctcccggcatcccggcctgggagaccggccctgaaagccggtaccccggcatcccttatattatcttccccggaaatgtaggggaacgtgacacgctgagacaagtcgtcacgctcttcctgtaactgtgcgggatcgtacacgtctgtgtaaggccggaaaatctgttgattttccggcctttcatttaggttacggctatttgcgttctttttccatcaatacttcctgtctccgtctgtcgcgcacaaatccatacttctcgtaaaacgcgcctgcgtcttctgtgtgaagcacgccgtggaggctgcccacatcatccatgatgcggtccatcaaaagtgtgccgagtccttttccgcggtatgcttcgtcgataatgacatccatcaggtaaaaggttgtggcaaaatctgtgatgatcctggcatagccgaccatatatccgtctctgtcatacacaccgtaacataccgagccttccatggcctttctgatcatttcctcggaacgtgttttggcccagtacgactggcgcatgagctctacgatccgcttcagatccagtttccccttgtccctgctcacataaaacgcttccttctgttcctgacactctgacgcaccttccagcgccatcttatcagcgctgtcctgttccacagtctgtctgagctgtctcgtgtacgggaacgcccccgcctccttctggccatatgtaagctgaagctcatactcaagcggcagccacgtgcggatgggtgcttcattgtgctgtatgagcgcctccatcttatcgagcgcatgcacgagctttgcctctccgctcacaccttccttaagttctgcaagcagggatacgagtctcccgcgctcaccgtccggcagcatctctgccacacggtgcacagcatcctcttcttctctgctgtccttctcctgcttctcaaagcatggtatgtccccggtgaccgcctccccaagatcgtgaaagagacacatctccatcacttttgtgctgtccatttccggaaattccgcctgcacaagccatgcaaagacacagagccggtatacgtgttccgccacgctctcccggcgtccgcttgacgtccacgaatgcctcaccgtacatttcagtttttctgccaccgacataaagtccagtaatatcctgctgtccatatgagctatccttccatgatcttcacatagaacttccggtttctcggaccatcgaattcgcagaaatacagatcctgccagatgccgagcagcaggtcgccgttgtggagaataagtgtctgggaaggtcccacaaagctcgtcttgatatgcgcgtgggaattgccctccacatgtctgtagtagtctgcgtccgccggcaccgcgcgctccatgccgcagagcatatcgtgcacaacgtccggatctgcattttcatttatggtaaatccggctgtcgtgtggggagaatatacaactacgatcccttgttccacaccgctttttttgatatccccgcggaccatgtccgtaaccttggacatctgttctgttccttttgtcgaaatgctgtgctcaaataaatgcatctttttacctcctatcctatctgtccacatattccatcaacgcgccgaattcctttttcatgagatgatagccatgctcataaaattccatgagtatgtcataattcttctccagtcttgacacggtcggtatgagcgggcggagcacaaagatctttccctccgcctccatctgttcgacgagacgcattgctttgttatattcaaagttcctccggatcgtcgtcctcacaagattcgggtacttcctgtaagcgcgccggtatacatttgccagcgcctttgacgtcatcttcttgcggtaccccggattcctcgtcagcatgagaatgatcttctcattgccgagctccgcagctctttttaccggcaccgaatcggcaagaccgccgtcaagatatgggatgccgtcaatatttacgatcggagagacaaggggcatactgctcgaagcccggcacagcttcatcagtcttcctttatcttccctctctttcatatattctgctcttccggtgacacagttcgtcgttacgatctcacactccatatcagaggcaaaataggtctcaaaatcaaaagggaagatttcattcggatacttgtcaaacaccatgtccatatcgagcaggctcttctcctttatgaacttcgtaaagccgtagtaatagtcatattccttctctttgtgtatcatacagtctctcgtcctgccgggctgtctggacacgtagtccaccccgttgcacgctcccgccgagactccgatgacgtgcgacatatatacgtccttctccatgagataatccagcgcacctgacgtaaatacccctctcgttgcaccgccttccagtacgatcgttgcttttttcatttatactcctcgctttctgttaccgtatacgttctatgatctcgtttgctcttgcatacacgtcctccggctcttcccctatgtggaatacgccgttttcatacagtatcctgccatttaccatggtgagcacaacgttttgtttgctgccgctgtatacgatgttcttcgttatgttattcaaaggctgcatattgggctggtgcagatccagcacggtcagatccgcatatttgccttccgccagcacgtcgcagtcatgaagtcccattgcgtgcgccccgtttaccaccgccatcttcagtacctcgtccgcatccacggccgccgcgtcggactctttaagcttcgcaagtccggtcacaagaaacatctcccggaacatgtcgaggcagttattgctcgccggcccgtcagtccctatggctaccggaatcccccgttcgatcatctgttttaccggtgcgatgccgctggcaagctttgtgttggagcctggatttgtcaccgcatagaggcctttttcccggaagatatccatgtcttcctctgtcatgtacacgcagtggtaaccgcctccaccgtgatcgtagacgccaagctccgccaacagcgcagtgggcgtcctgttgtaccttccgatacactgctctacttcttcttttgtctctgagttgtgcaggtataccggcgctttatacttatgggccagctcagaaaggccctccagcagttctctcgacgttgtatattcggcatgggcgccgaagcagaagctgacaagctcgtgatgatcattaagctccttataccactgttcctctttctcaagtgactggctgaaattattcatggccccgcaaagtacggtgcggaacccgcagtccgccgacgcctctgcgacacttaccgggtccatatacatgtcaaaattggcggtgatgccgcttgtcagatattccataactgccagttttgacagatggtacatgtcttcggacgtaagcttcgcctccatgggaaagacttgtttgttcagccagtcaaggagcggcatatcgtccgcatacgaccgcagaaaggtcatggccgagtgtgtgtgggcgttcttgaagcccggcatcagcacattgccctttacatctatttctctgtcccacaccgtatccgaaggtctgccgggccctctgtagactatatacggtccttttacccagacttctccttcttctatgccggtccctttctccatggaaagtatccgggcattataaaatcttatattcatgccgtctcctctctaatccagtctgctcacgatcttcgtcagcagggcgcggaaccgtccgcttacgacatcctccacattatttacatcttctgtcacatcgtggtcaagcactctgtccgcacttaagtttgtcgccagtgacaggccaagaacgtccatcctgcagtgagcggctgtgatcgcctctggaacggtggacatgcctaccatgtccgcgccgagaaggcgcatggcacggatctccgccggagtctcaaactgaggacccggtgcaaaatagtataccccttcctgcagagagaagccgagttccaccgccgcgtcttttgccagtctgcgaagcgacggtgtatacacgtcattcatactgaagaaccgctcgccaagctccggaatattttccccgcgctggggcgacaccccgcacaggttgatatgatcctttatgacacagatatcgccggtctcataattgagattgacggctccggccgcatttgtcaggataagcgtgcggatgccgagcagtttaaagacatagaccggaatcctcagttcctcgaagctgtatccttcataatgatggaatctgccggccatgcagagaactctcttaccgccgagccggccgcagacgagcttgcccgcgtgtcccggcgctgtggagatgagaaagttcggtatctctttgtagtaaatttccgtcttatctgtgatctcgtgctcgatctccccgaggcatgtgccgagaacaatgccgacggcaggcggtgtgccgatctgttctcttatatattccgcactttttctgtaaaattcatagtctggtttttcgtacatatttatatactccttctattcaaatagttttcttatacttttctcataaggcgctctcagtatgcccttctccgtcacgataccggttataaggctgtggtctgtcacatcaaaagccggattatagcatgttacgccttccggcgccatgggttccttataatacttctttatgatctcttcttcctctctcagttcgatctctatccgctctccgcacgggcagtccatatctattgtggaggacgggccaagcacataaaaggggatgttgtaatagtctgccagcaccgcaacactgctcgttccgatcttgttggcagtatctccgtttaaggcgacacggtcgcacccgacgaagcacgcctgcacccagccgtttttcatgacgatgcctgccatgctgtcgcagatgagcgtcacatcgatccccgccctcatcagctcgtacgtcgtaagcctcgccccctggagaagaggcctcgtctcatccgcatatactttaaaccgcatgccgcgctctgcgccgagtatgagcgggccgagcgcggtcccgtagcgggaagtcgcaagcggacctgcgttgcagtgggtgagaatgccgtcgccctcccggatgaggccgaggccgtactctgatatcgctctgcacatggcgatatcttcttcctgtatcttcgcgcactcccgcccgagcgcctcaagaacccctctgcgtccttttggcgcatgttctgcggctgttcgtaacatccttcctaccgcccagcttaaatttaccgctgtcggcctggaagcgttgagatacgccccgtacttttcaagttctttcagaaaatcctccatatcctctgtctctgtctgctgcgccagacagtacatgcagtatgccgcaaagatgccgatagccggggctccccgcaccttaagcttctgtatggccccgaacatttctccgggcgtgccaagctccagccgtaccgtccttgcaggaagttcgctctggtctatgataactacctttttcccgtctttactcaggccgacgttttcggccatgtcagtttccgcagcttttgttccgtccatgtcgtcgtccacctcctatctgtattttcaaggtttttgtccaaaatgtcaacccatagcttaagccttgctatttccttccatatttgataatataagcaatggaacgtccggatataccggcgttatgcagctttatcaacagcgcctgccggtatggaaggtgcacatggagatcagataaaatataaggagatagataagtatgatcagcacgagcaatataacactccgggtcggaaaaaaagccctgtttgaagacgtcaacatcaagtttacggaaggcaactgttatggccttatcggcgcaaacggcgccgggaaatctacatttttaagaattctttccgggcagctggagccttcaaagggcgaagtcatcattacgcccggcgaacgcctctctttccttcagcaggatcacttccagtacgatgaatatctcgtactggatacggtcatgatggggaacgcaaggctgtatgagatcatgaaggaaaaagaagtcatctacgccaaggaagactttaccgacgaggacggtatcaaagccagcgagctggaaggggaattcgcggccatgaacggctgggaggcagagtccgacgctgcaacgcttctcaatggccttggcattgacgccgagatgcactataaaacaatgaaagatctgaacggaccggaaaaagtgaaggtgcttcttgcccaggcgcttttcggcaatccggacattcttctgctcgatgagcctaccaaccatctggacttggacgccatcgcatggctggaggaattcctcatcaattttgacaatactgtgatcgtagtgtcccatgaccgttactttctgaacaaggtatgtacacagatcgcagacatagattacggcaagatcaagctctacgccggcaactacgacttctggtacgagtcgagccagctgctcatccgccagatgaaagaagccaacaagaaaaaggaagaaaagatcaaagagctgcaggagtttatctcccggttcagcgccaacgcttccaaatccaagcaggccacctcacgtaagcgcgcgctggaaaagatcgagctggatgatatccagccgtccagccgtaagtatccctacatcgatttccgcccgaaccgcgagatcggcaatgaagtgctgaccgtggacggtttgaccaaaacgatcgacggggagaaaatactggacaacatatccttcaccctgaaccgcgatgacaaggttgcctttgtcggcggcaacgaacttgccaagacgactttattccagatactgaccggtgcgatggagcccgacgagggcacctacaagtggggcgtcaccacatcacaggcctacttcccgctggacagcggcaacgaattcgacaacgactacaccatcgtcgaatggctcacccagtattctgaagaaaaagacgtgacttacgtgcgcggtttcctcggccgtatgctctttgccggcgaggacggtgtcaaaaaggtaaaagtgctctccggaggggaaaaagtccgctgtcttctctccaaaatgatgatatcaggcgccaacgtactccttcttgatgaaccgaccaaccatcttgatatggagtccatcacagcgctcaacaacggactcatcaaatttccgggcgtcctgctgttcagctcccgtgaccaccagatcgtccagacgacagccaaccgtatcatggaaatcgtgccgggcggaaaactcatcgacaagataacatcctacgacgagtacctggaaagcgatgagatggcaagaaagagacagacctactccgtacaaaacgaagaagacaactaaattgtcaaaggggtcagacccctgccgcggcaggggtctgacccctttgcaaattctttaaattatctgacatttcttctatattcctttagatttcccaaatattattttcttgcaatttgagtctgcatattatataatctctttatataaatcatttatataatatacttatttacgaaaggcggtatctatatgcccagacagagaatcacaaaggaaatggttgtaaaggccgcgtttgacctggcacgggacggtgggatggaaaatgtgacggtgaaggggatctcacagaagcttggctgctctgtgcagcctgtctattgctactgcagcaatatgaacggactgaaacaggatgtcattgaatatacgggcagctatctccgtgacttcataaagaaacgtctcgatgacacggacctctttcagagcatgggaatagcacatgcagaattcgcaaaaacagaaccccacctgtaccgtctctatttcctccgaaaaagagacggtgtcacctcaattgaagacatatacagagaggagaccgacccacaggtggcagaatttatctcacagcagcttcatcttcccatagaaaaagcacagcagctgcatatgaatatgctcatatacaataccggcatctcatttcttctcacagtgctgggcgataatacggatatcgggcagattgaacgtctgctgactcaggcaaaagatatattcacccattccttaatcacagacaatgaacaggagatcacgtaatgaaaacactcatcatttatcactctaagacaggattcacaaaaaaatatgccgaatggctgtccgaggcatccggctgtactctgcttcccttcgacaacgcaaaaaaggcggactttgcactttacgacacggtcgtcttcgcctcctcgtttcaagcgggcacgatacgaaagctaaatgcattcaaaaatctgaagctgaacggaaaaaacaagatcgtgatagtaacaggatgcaccccgcccggttctcctgaggtggatgccgccgttcagaacaatttcaaaacggatgcaggcgcgtataaagtgttctaccttccgggaggcctcagttacgaaagaatgggggctgccggcaaacttatgatgtccgccttctgcaagatgataaaaaagtccgcgggagaagacagtgaaatgtacagccgaatctcccattcttatgacaatacatctaaagaatacttgcagcctgtcataaattatctgaatagtttgtaaaaattgaaaggggtcagacccctgccgcggcaggggtctgacccctttcaaaattcaaaaaattatctgattctttctggaaatcccactttcttttgcacttttctcagtgtcttattggcaaaatattgtgccttttccgcattcgtttttatcacgctgtcaatatatgccttgtctttttcaagtcttgccacctcatcctgcagcggcttcagcactgacactactgcctccccgaccgccattttgaagtcgccgtaaccttttccgtcaaattcggctaccacttcgtccggtgtcttaccggtgcatgcgctgtaaatgtcaatgaggtttttgacgcctggctgctcgtcgcggtacaagatttgcgcttctgaatctgtcaccgcccgtttgcactttctcatgaccgtatccgggtcatccatgagatagatactggcgtttggattttcatctgatttggacatctttttcgccgggtcctgaagactcattatcttggccccgacttttccgatatacggctccggcacggtaaacacatcaccatagatgttgttgaaccgttctgcaatgtcccttgtcagttccaggtgctgcatctggtcgatacctaccggcactacatctgcctgatacagcagaatatccgccgccatgagcaccgggtaagtgaacagccctgcattgatattgtccgcgtgtttggctgatttgtccttaaactgtgtcatgcggttcagttcacccatatacgtaaagcaattcaggatccatgtcaattccgcatgtccggatacatgggactggtaatagatgcagtttttctccggatcaagccccgccgcgatatacagcgtcaacagcgcccttgcccgttttctcagtgtggccgggtcctggcgcaccgtgatggaatgcatatccaccacgctgtagaagcattcatattcatcgctcagcgtcacccagttcttgagcgcccccaggtaatttccaagtgtcaggcttcccgtcgcctgcatgccgctgaataatacttttctgtcttttatcatctcttcaaatcctccctgtctattcttcccatggtgccacttcatcgttatagtacaccacattttccgctatgatacgcgccccggaatcggacacttccacttccgtgaccgcgcagtttttgtggacacccacgccccagtaatcacaaagcggtctgccttttatgttgttcaggatccccgcaagcgcagccccgtgtgtcgttaccagtacagaagcatctttcagttcctgcctttgaaacagttcttccagaaattctcctgtccgcttttttacatccgcaaatccttctcctgcgtccggtacgatataatgctccggatcgtcaaagaaccgctggaattccctcggaagctcccatcccttcttagaacagcattttccctcatactctccgaaggccatctctttgatgcgcgcatccttgatcacaggaaccgccctgtcccccagtatgatccgggctgtctcaaccgccctgtcaagcggacttgtataacatatgtcaaagggaacctctgcaagtcccttcgccgtctcctctgccagatgtctcccaaactcattcaggggaatatctacctgtccctggatacgcctcgctttattccagtcagtctccccatgtcttacaaaatatatcttcatgatctgccgcctcctgtgcgcccgaaccggcgaaaaacaaacgcttctgcctggcagggctactttgatagtatagcacatctcctgctgtttttcatagaaaattacaaacaaaagtgctataatacgcatagtaccggcaggcacgcagacgcgcctccccaaagcagccggcatcatataagcaaaggagaatatatatggaaaaaatcacaagctttacaatagaccatacgagattactccccggagtgtacgtatcccggaaagaccatcccggcggacagacgatcactacatttgatctccgtatgacaagaccgaaccacgagcccgtcatgaacactgcggagatgcatgccatcgagcaccttgcggccacttttctgcgcaaccatgccaaatacggagaccggacgatctattttgggcccatgggctgccgcaccggtttttaccttcttctctccggagattatgagtcccgggatatcgtgcctcttatgaaagaactgttcgccttcatcgcggactttgaaggcgaagtgccgggcgcctccgaaaaggactgcggcaactgcctggatatgaaccttccgatggcaaaatatcttgccggcaggtatttgaaggaagtgctggaacagatcacagaccggcagcttatctaccctgagtgatacctcctgtaaatgcctttcactccaggacgtaccatccgtcttccgcagtaaacccgtacgtttcatacaccggccttcccggttccgaggccagaagccgcacctcacccgcaccggcttttctggcttcgtccacgagcagatccatgatcctgcatgccagtccctgtctccggtgatccaaagcagtgaacatattcgcaatatatgcgactttgccggaaggattggaaaaactgggcggatagtcgtagaagatgaccgctcctgtcgccgccactgagccgttatcttccgccagtatctgtacgatccggttttccgcaaatgcatgttcaaaaaatgttctcagttcttctcttatttccacttcttcatgcgccttctcgtggatcagctgcacacgccggatctcgcttatcagatcaatgtctttttctgttgcttttctgtactccatcattgccctctcatttttctgcagttgcgccaacgcacttttctttctataataaatgtagaacatacaaaggagaatgctatggctgtttcatatatcaaacgattcatccgccttctggcgggattattcttatttgccctcggcacctgcttcatcgtccaggcagacattggtctggcgccatgggatgccttcagcatggggctttccctcgccacaggactgtcttttggcgatatcgtcatcgtcaccggcatactgatcctcgtcgtcgactatctcatgcacgaacagctcggattcggaactatattaaatgcccttctcatcggaaaatttattgacctgctgcagtggtccggtattgttcccagaatggaacacttaagttccggcattgtgatgctgctggccggagagatcatcatatgtctcgccacatttctgtacgtcggaaccggcctcggctgcggcccgagggatgctctcatggtagccctcggcaaacgttttcaggagaaaccgatcggcctcatccggggcatcatagaaggctctgttcttctggccggctggctgctcggagcgaaaataggaatcggcaccgttatcgctgtgttcgggatcggcttcatcctccagtttacgtttaagcttctgcgctttgacgtcacttcagtccgccatgaaagtatactggacacactgcggatatggaagggcagaaaagacaaaacgtcttaacgttctgcggcctgtctgagcgtttcccctgaaagcctgtaaacgctccactcatccatctgttctgccccgagcgaccggtagaattcaatgctcggttcgttccagtccagacatgaccattcaagccggccgcacccccgctctacggcgattgccgcaagctttttaagaagcgccttcccgtaccccctgccccgctcttcctccagaacgaacaagtcttccaggtataggcccgcccttccgagaaaggtggagaaattgtggaaaaacagagcaaatccaacttcttttccttctgacaaggcaaagaggacctccgccttttcccgttcaaatatccactctctgagcagcgcttccgtagctaccacatcctcctccatatgttcatactctgccagcttctttataaaacccagtataagtcccgcatcttcccttccggcgaaccggaatgtaacttttgaatccttcatctttacctcctgctatatcattctgcttcccgccctgcgcccgagccacgcgccgcacagacatcccgcaacactgagcagcacatacgccgccgcatacagccggttcccccgctctatcaaagtgatggtctccagcgaaaaagcagaaaatgtagtgaaccctccgcatactcctgtcttcagaaataacaggagattcggtctcatcgtcccgctgctctgtgcgatcccggtcacgagcccgatcagcagcgcccctgccaggttcgtgataagcgtaagtacagggaattcccccctccacggtatcaggcttaatgcgtaccggcacatggctccgagcgctccgccaaggccgacaatgatcattttgtccatcctgtcctccccaatatcttctccagcgtgtctctgtcaatctcatctgcgcgcacgaccggctccggctttagaggatgcccgccaagcatcttctccatccagaccatatcgtaccatctcccctgcttgtagccgcattttgtgaaatgtccggctgtcttatatcccatccgctcatgaaaagagatactgtccggattcggccatgcgatacaggcattcagattaatgatattctgcagcttcaaaatctcctccagcgtctcatacagcctcttgcccacaccgaaagaccgtttctgccgatctacatacacagtcgtctccaccgcccagtcataagccgcccggtccttaaatgccgacacatatgcatatccgcatacttccccgtcctcctccgccataagatacggatacttctcttttacgctacgcatgcgccgggtgaattcctccgtcgacgggaccttatattcaaatgtgactgccgtctgctccacataataagcatatacagcaagcaatgcggcagcgtctttctcttccgccatccttatcttcatcttctgtacctcttcttttttcctctgccgcaaaacagcctaagaagcagatatacggcgagcagtaacgtccctgcggccagcagccattttccgctgcctgcgagcgtatccgcggacactgttatttggcttcccatcatctgccggcccagttcatctgccgccgcagaaagcacagcaggaaagatacagccggcagtcgatccggccagtatgccgcagagtcccaggtgaaaaaggaagcgtcccccggaaagccttaacagcacgatgccaagcacacacataccggcgatcgccactgccaccatgcgcacagtctctgaagtcataaatccatacattttaaatataagcttctgcccgtctgtcataccggataacgcctcatccgccgccgtcccaagctctgtttccatctgttctccgacagaagagagcgcgcttttcaaaatactcctgtgcagttcgttaagttcaactccaaacgccttttctaaattgtctatattgtcgtccaccgcctcgtttatatatgaagacacatccggagactgaaacggtgtgccgtctgccgtcgcctctgccaccgcgtccagatagtcgccgaccagcgcccgaaggtgttcgtctctgctgattttatctgccgcgttttctatctgctcttgagtagcccccggaaacatggtatggatcccgtctgccgcagcagaagtgactgcctgttttatcaccgcctctgtcactgcctcggcgcatatctcctttaccgccgccccggtcagtacaaataccgccgccagtacaagaacaatatccagtataacactcattaattttttcatataatactcccagtcccccgtctattcattcacgatgctgacctgacacaccttcatcgcttccagcgcctgccggtggctctgcggcgtcactccggcgcagcacgacgcatctacgataagttccgtctcaggcagaaatgcttttacgaccagtacgttagaaatgacacatatatccgtacagaggccgacgaatgtcacagactccaccttttcttcctgactgtcataagctttgagcacctgcccaagcccgacacttccaaacgaaggtttatcgatcggagtctccgagcaaagcgcctcgatctgcggacagatctcccacccttttgtccctctgatacaatgtggcaccggcagtttctttccctcctgtgtgtccatgtaatcactttcatgcgtgtcccgtgtataaagcacacggccttcaaagtttctgatcttctccgccacagccggcacgatccccacagcttcctctgttccaagcgcgccatccacaaaatcattctgcatatcaactacaacgagtattttcataacagcatctccttttcacatccttcacacattgtctgttatataatagcatatacgaacggcaacttccagacagcagaagcaaaaacagcagcgcgggatggatcaacgtactgtatccctcctgcgccgctggcaaaaactacactcttatattaaaagttaaattcatcttcccagttaaactgagccgacccttccagacttttcggccagtggccgcaccagtccggcacatgaggatcttccacccggtcaaggcttggtgtgtaaggtttaatgtccagcacaggactgccgtcatctgcatccgtataggcgatgtgtataagaccattctcatagtctatgccgacgacttctgagacagtgagcgcaaccggattcgggcggatcggtgaccttgtcgcaaagatccccatgtcagccggggccttcttatacggctgttctgcctccagcacagcccgtgcctcctcatagtcaaactcactgaaccaccagatcacattaatgtggctgaacccatccaatgccgtgagcgccggaatatactgcttttccagctgtatacatgttccttcctctgtgctgctaatttttccgacaggacgtacttcaaatacagtcataatattacctccatttatattattataatttgctgtacgtctattctggaccctgacaccgtgtgagagtcaagcatggaatctgtatctcggtcagatatttctcttctgcctcttcattccacggtccgcggtgcacgatctggcggctctgcccggtcatcctgtagagacggttctgctgcagccactctgccagggcggcgtaagctcccgctatattagaaaatgctccgtacaccatcgtacatgccatatagggcacctcctccaccgtccggaatgaaaacgcacccgtgcctttccccggcttatctacaggcgcacagatctccacatccacgtccctttctttatattccgcgtcatgatagatggaaaatgtctcttccggcaccgtgatcttatgcctctctgcaaagacagacaattcctcccacagttcaccttccgcgtaatatgtcggtatgacctttctaagcgacaacacactgcacggcgggatggacttgatcgacacattgtaatgcatcctgccgccataggacagttcttccctggccagttttattctttccagcctcatctgctcctcttcgatcctcccagtgatctcgccgtactttttgtcaagctgtctgatgataaacttgtcgtccccgctgtctacagcttccatgatctctgccacgccaaatccgctgtcccttaaatatatgattctgttaagcacaggtatctgcgcggcagaatacatacggtaaccagtctgcgggtctgttttctccggcttcagaagccctgcgtcatcgtaatagcggagcattctgacagacacctgcgtaagctttgagaattcaccaattctgaacatatcgtttctccctgtaatccaattggggacggggtatttttaaaaataccccgtccccaattgatttgacggcatgtcctccatgggctacgccgtctgtgcagaccgtcgccggtcttcttatatcaatatcttctgtaagatatattatgccaccttgctttttgcaagctccgcaagtgttgcgaatcctgcagcatcattaactgccatctctgccagcatcttcctgttcatgtcaacatcagccagtttcaggccgtgcatgaatttgctgtaagataatccgttcattcttgcagctgcattgatacgtgcgatccagagctgacgcatctgacgcttacgctgctttctgcccgcatatgcggatgtaagagctctcatgacagactgctttgcaactctgtactgtttagagcgtgctcctctgtatccctttgccagttttaatgttctattatgtttcttcttagcgttcattccgcctttaattcttgccatctcttatttcctccttcaatacgttccttatcttacagatatggtaatactttcttcatattcttaacgttagttgcatctgtaacagtcggttttctaagatttctctttctctttgtagatttcttagtcaagatatggctcttataagctttgtttcttactaactttcctgtacctgtttttttgaagcgctttgcagccgctctatttgttttaatttttggcatgataatattcctccttaagtttaaatttatatttttaacgtttttcagttaaaaccatgctcatgcttctgccttccatcttggccggcttttctatcgtggccacatctgcgagctgttctgcaaaatcatcaagtatgtgtctgctctgatgtacatgtgccatttcccttcctctgaaacgcagagtaaccttaactttattgccttttccgataaacttctttgcattgttgatcttcgtattcaggtcgtttgtgtcaatatttggagaaagacgcacttccttcaattcaacggtcttctgctttttcttcgcttctttttctttccttgccagttcatatttgtatttgccgtagtcaataatcttacaaaccggcggttgagccttcggcgcaatctttacgaggtcaagctccgcctccgctgcaagcttcattgcgtcccttgccgccataactcctaactgctctccgtcttcgccaatcacgcgtacttccttgtctctgatttgcccgttaatcattaaatcgctaatagtagtgcacctccatcataaaataaacataaaaataagtgaacagccgtcagactatccaccagtatatctgcatacgaagaccatatatttatatagtccgttcatatttcaatatcaaaccgatagtcacccgatcgtgctatggtgagagtggatactctgctttgttttttgcttcatgcaaggtataatctaacacacttgccgcggtatgtcaacacttttgatattttcttcttgaaaacagtgtctattcatgtaataatagagcataatctattttaaatggaatgttttaaaacatgaggaggtttttatgcaacaaaagagaagtaatttttccagcaagctgggattcgtgctggctgcttccggttccgccgtaggtctggggaatatatggcggtttccgtatctcgcggcaaagtacggcggaggtacttttttacttatttatctcatacttgcagtcacatttgggttttcccttatgatcgcagaaatcgccatcggaagaaagaccggcttaagtgccatcggcgcttttaaaatgctggacaaacggtttggatttctcgggatcctggcatctgccgtaccgatcgtcatcttcccctactattctgtcatcggcggatgggtggtcaaatactttaccgtatttataagcggaggagcaggcgcctctgcggcggacgactatttttccacttttataagcggtacttttgaaccgctcggctggttctttatcttccttgccgtcacagcgcttatcgtcttatgcggcgtagaaaaaggaatcgagaaagtcagtaagataatgatgcccatactcgtcgtcctgacgctcgttatatctgtatacggactgacacgcgaaggtgccatggaaggacttgtatactatatcaaaccgcacatgtccgatgtatcggccaaaacaatacttgccgctatgggacagctcttctattccatgtcccttgccatgggtatcatggttacctacggctcttatatgaagaaggacaaccaccttgaaagctccgtccgccagatcgaactgttcgataccggaatcgcctttctggcaggtctcatgatcatccccgccgtatttgcattttccggcggagacgagagtgctttaagcgccggcccgggactcatgttcatcacgcttccgaaagtattcgccagcatgaagcttggcggcgcgatcggtactattttcttcctgctcgtcttcttcgcggcgcttacatccgcgatctcgctgatggagactatcgtatccatcttccgggacaagttcaactggagcagaaagggagcctgtatctttgtcgctgtgctggcacttatcatgggcgcgccgtcttcactcggcttcgggccgctcagcttcattagctggatgggcatgtccgtacttgacatcatggacttcgtaagcaacagtgtgctcatgcctatcgtggcgttcttcacctgtatcttcgtcggatttttcatcaagacaaagagcatttcagatgaagtcagggtaacagacggaaaattcaaagcagaaaaactgttcacggtcatgataaaatgggtcgcgccgatctttctgctgctcatactgctcagctcagtaggcggtgccctcggcatcgatttcctccaggcgctgagtgtataaatggggatttttgttggatgaattttaatgggatggcggtgtacggcggaggaaaggcagtctaaagctgcgggacggtcagtgcgcttgcattccgtaagtgaaaaggacacggtagtaacagacaccgacagaatcgacaggaaatctggatgatttcctgtctcagctgtctcataaactgcacttgtagtgcagtttatggcctgtttctaccgtgtctttttcactaacggaatggcaaagctccctccaacgcccctcagctttagactgcctttcctccgcctgttactcctccaatgctcaaatagatccaacacgtaagattccctgggctgccataatggatttacaccacaggcaaagactctgtagctcccacctatatctcctatgaccaccacgcccttctgaacttaccactccagccttcaggatacatcttcacccatcgagacatacctgggaatctctcccgtttggaatgtttatatttttgcgagatgaacaggccgaggagccgggtgtgcagggtggcggcagggcgttcggaggcaggtgtggaagccgttgctgaagaacgagccggaaacagacacgggaatgttatcacaaataacattcccgagagcctctgagggaggaaatcccttcaggatttcattccgaataggctcggttgtctgcttccggctcgttctgcagttacggcttcccgcctgccggagcgccctgccgccgccctgcgcgcccggctcctcggccgtccacccccaaaacttcaaacatccccaaacaaaattcccaactactccacaacccagcactttatttccctggctccggcgtatttctccatgtacgctctgccatactcgagcgctttctccagatctttattgtcggaaaaggaatagataagtgtgaggacttcctctgcgctttcagttatcatcgcccgttcggaatcgcttgtggaactgcctaccgctcctttttcgtctgccagcacgggaaggttttcgatgtttacctcttcctttccgattcctttgtacgtctccttttctctgccgatacggaagatgagctcatcgcctatattggccgtatcgtaggatccgaccgagaacccggattctatggagatcatattgttgacatccaccaccgtgttcacttcatacagccctttcccctggcctatcctgcgtatgagcgcctcggaggacacacggtacctgctcgggtccttgccgaatgccttgtaggcaaggcgtgactccctgatgtttggaatatcatttatgccgtgatcgaaaatattatccttggctttcttaaatatatcttttttcagatatgaccacatctcttcgttcttcttttctactttcactttgtactgcatgcatccgactcttacggaaggccacagttctttcatacgcgcgtcaataatcaattttttcattatgctgcatcctttcttttactttatgtaccgttacatctttccaaccgctctatccggtccaaaactttaattaaaaagagacagatatagacctggccatgaattgccggaaatacctgcccctctcactcattttatttaaacgatgctaccgtttattccccatattaaacactgccaccactccggggcctgtatggcttccgatcacagtgccgatattattaatgaggatattatccacacccatcttctcccgcacgagagacgccacatattctgcctcgtcaacgcagtcgccgtgcgtgatcatgattatatcgttctcccatcctctggactgttctgccgccatgtctacaatatggttcagagatttcttgcgtcctctttccttgccgactacctgcagagtgccgtcattgtccatatggatgatcggctttatctttaccatcgttcccactaccgccgtcgccttggatacacggccgccccggtgcagatggttcagatcatccaccgttacattatggcatacgtgaagcttattctcctccacccactgcgccgtctcgtcaattgtcttaccggcttctctaagctgaagcgctttatataataacagtccttcccccaaacatgcgcacagtgtatctatggcaatcacctttgcctccggatacgcttctgacaattctgctgctgcgatctgcatactgttgcacgtaccgctcaagcccgatgaaaagccgagatgcagtacatcttttccttcttttatgataggctccagcgcttcttttgcctcctcaggatttacctgtgaagtcactgacatctttccttcccgcagcttgtcaaaaaattctttggaagtcagtccttccatgtcggggtaagtctgtccatcgatcgtataatgaagcggtattacaggtacatttctttcctgcagccattccttcggtaaatcaacggtactgtttacagttataacatagtctctcataccctagtcctccttctccttgcctgcactcatcataccactttttctcatgttaagcaaaacgtttttaaatgtaaacgcaaacaataccgatgtcgtaagcacggatatgatatccgcgatcggctctgccctgtatatgcccatgactcccataaacttcggaagtatgaccgccagcggtatgagcaggatcactttacgcagcagcgcgataaacagcgacaccttcgcctgaccgagcgcaagaaatgtagactgacacgcggactggatcccaaatatcataattccgaaaaagtatatcggcattaccctgcacgtcagcgcaacgagtttgtcattgtttgtaaacagactggcatatacttccggtactgtcaccgcgattccggcaagaagcaaggtgcctgcaaagcatacgagcagcattcttataaacgcgccttttactctctttctgtttccggctccgtaattatagctgataatgggctggatcccctgagtgattccctgcaccggtatgacgatgagctgcatcacgctcgtcatgatggacattgtccccacatacaagtctcctccgtatctttgaagtccggaattcagcgtaatacttacgaggctttccgtactctgcatgataaagggagacaccccgagtcctgctatgtgttttacgatatctccctgaagcttcatatacttcactctgagccttatgacgctcttttctgacaaaagaaaccgcagcacccacgcggcactgaccgcctgagagataatggtagccagggcggcgcctttcacgcccatatgcagtgcaaagatgaacaccggatccagggcaatgttgatcaccgcgccaatcagcaccgagagcatggcgatcctggcctctccctggccgcttatgaacgtattcagtcccacggcgatctggacgaataccgtgcctatgagatagatggctatgtacgactccgcataggatattgtctgctcactggccccgaatgcatacagtatcggtgtcttgaatatggagaaaaaaacggtcagcacaacggaaaaaatgatcagcagtccggccgaattgccgaggatccgctccgccttgtcatgatccttcttccctaactgtatggaagcaagcggcgctcctcccatacccgcaaacgcgctgaacgctgcgataagcatgatgatggggaatgtaactcccacgccggtcagcgccacatccccgtaaccggagatatgtccgatgtagatcctgtccacgatattatagagaacattgatgagctgggccgcaaccgcgggcactgccatccctgccatgagccggccgagaggcgctgtgccgagccgttcgtctctcccgctgtcattgtttttctgttgattctgtacctccatatgtaacctcctgatatcattatgaaaaaaagtatcccccgcctgcaggcatacattaagaccaagagcccggcaggccggcctcttggtttattttaactcttgtcatatactctttttcttattataacacattttaattcagttttatattcaaataatttctgcctgacaaagtcttgttaaagcagatactgcacacgattatgatgcatccggccgcaaacccgatccagttgaacagagctgtgagcacaagcagaagcagccgcatgaacttgagtgcataaccaagctcaaagttcggctgtgtgtaatttgccacagcgacaaatgccatgtaaagcatgacttccgaattgaaccaccctgacttcacagagaactctcccattacaagacctgcgataacactcagcggcgtactcagcatgctcggcgtattaagcgccgcaagccgcaggccgtcgatggcgatctcaaggatgagcagctggaaaataagagggatatttaccatatcttttaccgccacaaacgcaaacgcgtcgggcagccagttcagattctgcataaacaaaagaaagagcggcgtcaaaaatacagtcatgatcgtgatcagtgccctggacaccttcagatagattccggtcagcgtcggaaaataataatcatttgcctcctctatcatatccagtatggaagtcggcaggatcatggcggacggtgaattgtcgacaagaataacgaccttcccctccagcagacaggctgccgctgtgtcgggccgttcggtaaacttaaacttcgggaacggattgaaccactttctcttatacagacattctgcaagactctgctggttcatcctcaggtcgtccgtcttgatggactttattctcgtcatgaccgtgttcagaagttctgtgtccacccggtctttcatataacagattgccacatccgtgcgcgaactgtcacccacctccagcatctgcatcgtaagatgcggatcccggatcctccttctcatcaaggcagtattaaatacaatcgtctcaacaaatccgtccctggatccgcgcagtgatttatctttgtccggctcctccacactccgcgccggatatgttctgcagtctatggcgatacaagcctcgtagccctctataaacagacaagtaacaccggagagaatattgcgcagtacctggtcaaaatccccgatgatatctacttccacataagggatgcattctctcgcaaacgccgttgcgtctgcaggcatatcttcctccgtcaccttaaacatggaatccatgatcttcagcatagattcatctttcgtaaatccgtcgataaagtaaaaggacgcgacccttccccctatcatcatatcccgctgtataatatcaaaactatcctgcaccggcagaaccttgttcaaatattccgtactttcttctctcgatgcagttactttcttcttttccggcataacagtccctccatgaatgtgataagataatattccacggttagactgccccgaaaactcagaaaatatactatcgggggcagggcaaaagccggttggggacgggggtttttttaaaaacccccgtccccaaccggcttttgccctgtccccgaccggatcttgtgttaatttgaagtgctcccaaatccgccgttcctgatttcggtcacatcatcgtccattgtaattccatactcgacgaagattccctgcatgaatcctgctccggcttccagttcaactgttttttcctcatttgtatcatttgttatttttgcaaaaatatgcccttcgttgtccgaataaaaataatcgctgtctataatgcctaccgtattgttgagctgcagcctgtatttgaatccaagcccgcttctcgggtagcatttcagcacccagttatcctgcatctccgcgcgtatccctgtagggatctttacagtctttcccggatggagcacgaccggaaccggggtaaagaaatcgtagccggccgaaccggccgtcgctcttttgggcagacggaccgcatcgtacacttcctgtatctccttatcttcaaccgcaccgaacgtgtctctgaagtcttctttaaactgttcaaaactcactttgtgaaactgcgcaactctcttagccatgtagcactatctctcctgtcttctttgtatttttaacatcgatcaccatctggttgctgcttcctttccagtggagcgtactgtcttttttctcttcgacaaactcaccgtccacgagcacgtccacatagtcgaacacatccaggtctttgatctcatcccagacgctgcctgtatagagccagatcgtcttatccggatacttctctttgacctctctcgccagatctgttatctcttttatatttgcttcatggagcggatccccgcctgagaacgtcactccgttcacataatccttttcaagctccgcatatatctcctgccttgcatcttcatcaaagagcaggccgtcgtccgggttccacgtcacctgattgtggcaccctttacagccgtgggaacatccggatacccataatacaacgcgcaggccgtcaccgttgagcatatcatccttcgtaatattatgataccgcatcttctacatacttttcctttctgctatttctgccatcttggccgcgttgagacgtgtgtctcccttgactctcgagtaagaaagatatccgttcatacggtctatcttcgtcagatttttgctgccgcacaccgggcagacatccatggacaattcttcatgcccgcagtcatcacagtaggacagagagagatttaccccctcgtaaaatcctttttccatcgcccgcctcacaagcgcttttatcgcctctttgttgtagttgaccgggtactttacatactggatcttcccgccgttgctcaaattccagaatcgtccttccagatcctgcttctggatcggcgtgatctcctccgacacatggcagtgaaaactgttgcttacatattcccggtcagatacattctcaataataccgtactttttgcggaactgctgtatctgcacgccgcacaggttctctgccggagtaccgtagatggcatagagatgcccgtctttttctttatattcattgatcttgtcgttgatgtgctgcagcgtatcaagcgcaaactgcccgtcctgcgcaagtgacttcttattatgtaactgctgcagctcgttcagcgctgtgatgccaaatgacgcggtagcagacttcagcagaggtttgatcttgtcgtaaagtccgagatgccccccgtaaaatcctccttcgcagtacgcaagcggattcgtggacgccttcatctcaccgagatactcatacgtccgtatgtgcagctggcggatcagctccagataatagtccagcacctcgtaaaattctctgctctcctgcttcgctttcgcgtagatcatcggcaggtgcaggctgatcgctccgatattaaaccgccccacaaatacaggctcatcctgttcatccgccggctccatccccccattttcataccacggggaaagaaaggcgcggcatcccatcgggcttatgatcttgccgtactttttatacatactggcaacataaccgtctccggtcaggctcagccagtccggatacatcgtcttcgcagaacattctatgcccgcctcaaacagatcctccagcggctttcccggtccgtgaaggttctcatcatacaaaaatacgatcttcggaaacagcaccggctttttgtggccctctttgccctgtccgctgccgcgcacttccagcatcttctttgtcgcaagcttgccgtacttgtctgtcacagtgcctgccgtgacagtgataaacggatagtctcccctgctggaggacacagagttgaacttgtactcccatccctgaaagccctgttccatctccttttccagatctgcccatgcgatattctgtacggtctcttcctcaagaccgagccccctgtatttttcgatcagcttccggtgggacttctcagcgtaaggcgccaggatctcatccacgcttggcacggtaaagccgccgtactgctggcttgcggcgctcagtacgatgtcgccgatcacatcgaatgccgtgtccagtgtcttcggctcattgtaccagagattccccatctcaaagccgccgttcaaaactgccttaacatcaaagagacagcagttcatcgtatcacgccttgcggacatgtcgtgaatatatatgtatccgtcccttatggcctggacttcctccaccgtgagaaagaacttcttgtacagctccttgttcagctcattgaatatgagacttctcttcgtggatacaagcgcactgtcggtgttgctgttctctttatccccaatgtacatgatcgactggctcttcttgtacacttcatccagcatctggacgaaatcctgcttgtaattcctgtaatccctgtagcttttggcgacgacaggattcactttttcaagcgcgccttccactacattgtgcatctcagcgatcggaatctcggcaacatttctggcgtccaccttctcctccacgaagctgcagatgaatccaagctcctcctccgtaaattttacgagcgcccggtaggcggatttgttcacagccaccacgaccttctgcacgttaaactcttcttttgtaccgtccttttttactacttttacctcatttttcattcaggcataccttccttctctctgatgtcatcctatatttagtatagccgtcaggcatcatcacaatatcatgtgtttcaactcacctattaatattaccattccccatgtggagcgtcaatgacacctcaggaaaaataattcacaaaaatagagcccgctaaggctctgcaaattgtatatatttatttccgtctgaaaagggccatagaatgcggctgttaattgccgcattctatgcttatctcattgaacagcttcagtatgtcatccactgtaatgttctctttttcttcttcttttttgtccaggataacttccccctgatgcatcatcagaagacggtttccatattccaccgcataccgcaggttatgagtcaccatgatcgtcgtgagatgcttcgccttaacgatcttatcggtcagctccatgatgagctctgctgtcttcgggtcgagagccgccgtatgttcatccagaatgaggaactcgatcggcgtcatcgtggacataagcagcgccatcgcctgtctctgcccgccggacagcgaccctacctttatatccatcttatcctctaggccaagaccgagctggctcagctgttccctgtagtagccgatccttgccttattcgtccctctcccaagcccgtacagcctgcctttattatccgccagcgacatattctccaggatcgtcatagacggacatgtccccatggccggattctggtatacccttccaatccgttcatttctgcggtattccttttccttcgtgatgtccttgtcattgataagtatcctgcccgcctcaagcggtatgctgccgcagatgatattcagcatggaagtcttccccgagccgttgctcccgacaacagaaagaaactctccctgctctatcttcagatgaaagtcgtgaaacagacacatctcattgatcgtaccaggattgtaatatttctcgattcctctaagctcaagcattcttattcaccttcttctttctctccatacttatgataaggataataaggaacagcactgcggtgatgagcttcatcgcctgcggttcaaagttcttaagcgcgaccgccacacatgctttatatatgacagaaccggccaggactgccgtcgtggcctttaaaaacgtcaccttcttgaatatgctcgttccgatgattacacttgccagcccgatcactatggcgccggttcccatggagatctcaaacactctctcctcctgggcaaacacgcatcccgccagcgatacaagcccgttcgcgatagcgaggccgaggatcttcacattgccctggtctttcgcaagggaggtgacaagtgtgtcattgtctccgactgcccgcagcagatatccagactttgttttcagatacagatcgagcagcaccttgctgatcagcgccaggatcagtatgacgatcagtgtcgtgtacggcttaagcgcctccggcacaatactgctgatcatatcattcttgaagatcgtcttctgcgaaaacagcggtacgttggatgttcccgcgatatagaggtttaccgtccagagcgccgtcatcatgatgatcccggacagcagatcccttaccctgcactttacatggatgagcccggtgcagacacctgcgagtacgccggccgcaaacgccgccagtaaagccacgtacggattcactccccgcgtaacgagggcggccgtgatcgccgcccccagcgggaaacttccgtcaaccgtgaggtccggaaaatcaagtattttgtatgtgatatagacccccagcgccaatatcccatatataagcccctgttcaataatagttacgatcaagttcatgaaaatgcctcccgcatacgatttatactttctctgttactctgttatctcgtcaaagctctcgaccgcatctgccgacagagtctccggtacagagattccaagattctcagctacttttgtatttacataaaatcccggttccgtgatgagttcaaaattcatctcggaagctttcttttctcctttcagcacctgcgctgccattttccccgtctgtctgccaagcgcgatatagtcaattccttccgccgcaaggcatccgatcttcacctgctcgatctcgctgccaaacaccgggatcttcttgctgttcgctttctcaaggatagtcggaagagacgctacgaccgtgttgtccgtaaggtttgtgatacagtccacctggcttaaaaggtcgtctgcggcaagggatacgtccgctgtcgccgtgattcctttctccacaagttcaaagtcatattttccgaccagttctttgtattctgcgatcgcggatacggaattcgcctcgctcgttgtgtacatgatccctatcttttttgcatccggaagcatctcccggatcattttcaactgttcttccaccggaagtttatcggatgttcctgtcacctctccgaccggtgttccctcttcatccgcaagctctgccgccaccggatcggtcaccgcggtgtacacgaccgggatctggctgtccatggccgcgttgtatgcgctctgcgccgtcggtgtcgctatggcgcagatcaagtctactttgtcagacacgaagctgtcggaaatctgtcctgccgttcccatatctgccgccgcgttcttatattcaacggtaagattatcaccttctttgatgccttcgtcctccagtccttgcagaaatccttccctgcagttgtccagagaaccgtgctctgcaaactgttcgataccgatcgtgtagttctctttctccgcgctgccggatgatttggaagaatccccgcatcctgtcactaatactgccgtcatcgctgttaccaataatcctgctgttaatttctttttcattgttctttctcctttttctttgatagattttttgtttctgttaggagagaaaatattagagcgtactgcgcggcctgccgcaggcattccgtggcttatgttctctcagccgcgagtgtcccgcctggaatgtccgcattctctgccacgcgcaaaaaaccgccccaaacctttaggtttgaggcggtaataatttactcttattatcgcggtaccactcaaattgacgaatcgtccacttttctcatgtactaacatacactcctgattgataacgggttcggttcccgacacaccatactctcaattgatttcaggctgccctcgaaagtccattcaactatctccttcatacggcaatcgcaccacctgccgctctcttggatgttgtaagataatctactcctctttctcaacggtttttcttatttacaacttatactttaattcaccaaagtgcatttgtcaagtcaaatctgattttttctaatctttgataaccggtaccggtgtatcgtctttcgcgtcgaggtcgtttatgtacttcttcgtctctttcacgataacattggacaataacagtaccgcaacaaggtttggaatagccatcagcgcattcagcgtatcggcgatcagccatacaaggtcaagagctatgatcggagcgatcgctgcaacgagcagataaattatacgatatacgaacataactttactgcctgcaaaatattccacacaacgctctccgtaatatgcccatccaagaatcgtagagtaggcaaaggagatgatgccaagtgtcagaataacaggtccgaggtacggaatctggctaaatgccatagatgtaagaacaccgccattttcaatcgtatctgcgttaatagatggattcttcatgatcgtcgtaacgagtacaaggcctgtcatagcacaaacaactactgtatcccagaatgtacctgtggatgatacgagcgcctgacgaaccgggtttctcgtctgagctgctgccgccgcgataggcgcagaacccataccagactcattagagaataatcctcttgcagcacccatcttcatggctatcataagaccgccgcccacaagaccgcctgcagcggagccaggtgtaaacgcaagtcttccgatcgttgcaagtgcagggatgatgaaatcatagttcatacataaaataacaatacatccgatgacatagaagatagccatgaaaggaactaacttctcacatactctggcgatagatttgattccaccgaagataacgattccggtaaggactgcaactacgataccaaccggccattttggaatgccgaggttttcgttacatacagttgcgatcgcgttaacctgtgtagcacagccgataccgaaggatgcaaatcctgccagcaccgcgaaagtaacaccgagccacttcatgttaagtccgcgttccagagcccacatggcaccgccctgcatacggccgtcttctgtcttcactctgtacttgactgcgatcaatgattcagaatactttgtcgcgatcccgaatacaccgatgagccagcaccacaatactgctcctggtcctccgatcgcaatggccgtacctacaccgatgatattaccggttccgatagtagctgccagggcggtcgtaagtgctccgaactgagatacttcaccttctgcttccgggtcttttgtcaccgacagtttaataccctttgagagtgtctttctctggataaatcctgtacggatcgtcataaatacatgggtaccaaacagcaggatgatcatgaaccagccccatacccagccattgatggttgttacgaaagaattaatagcatcaaacatattattcccccttctctttcctttgattttagtatgcactttctgatataaatagtactacgataaaaacaaacaggtgtcgacatctgttgtcgaccgcccccctgtatcacctaaaaacattgtacatgaatttgtagaaaatagcaactatcgttataatattgacattcaattcgtcataatgacgaaataataaagattattcttcatttttcaaatcgttaaataaataactaacgaatttatctcacaatttacgcggctatttcctgccgacagcaaaacaaaaagaccccgaaggtatattccgccttcggagtctttgtatattctgtataggctgtacaatgcagtactatatatcgtatgtaacgaaatcatattaacatataattccatttcctgcaagcccgtttcgcatgatctctttataccgccctgtactttatataccttttgcagtatctttcttctgactcttctatgggaacctgtatgccctcgccgcttccataaaaatatcgatctgcccgggccgggtcgtctcgggaatgtcacatcccgatgccagcacatacccccgcgcggacttaagcccggcatcaatacaggtgctgaccgcctgtatgatttcttcctttgtcccattcataatgatctctaccgggtccacatttccggctatcgggacatgcgcccccagttccagggcagctttctccagatcaacgatattgtccagactcacttcattcagttgatacttcttgaaatactcccagatcctgtctgtctttccgcacatatgcagcgacaccttcttccctgtctttgtatatgcgtaatcggtcagttccctggtaaacggatatacaaatttttcatacatcccgggacctatcaatgcagggttcgccaccggatcagccatggcgatccccatcccgtgatccgccgccagatcaatacagcttttttcactgtccgtaattatccgcatcaaatacagaatttcctccgggcacttccggcagtcgcgcagcagacattccaccccgcgcagattagatgcgatcgtaagcggacctcctatgctcatctccacaggtacaatgtcaagcgccttctcctcgagaattgcggctgcgtgggcaaagtcctgtatccgtccgtttctgcgggcatcgaccggctccatgatcttcaggcggctgtagtcatcaagtatcggtgcccccatataaggtacaccgcgctgcggataaacaacctggcctccaagcgcctctgtaatgcctctggagttgggtccaatatccatccggtcatatccgtaacggttgaacggtatgatttccgcttccgccattttctccgggtcatgggacaagtcccatacgctgaccccgctcagcacccccttcaattcccccataaaggggacacacggtatacggtcatacgcttcccctttttcgatggccttctttctctcagcaggtgtcatcttatctgcattgttcttatatacttccgtcaatttcttccctctctttaaagctgcacgcagcagaatatcaatattattgtagtattctatcatcgatccggacaaattgtccagaagataatcttccgtctctgaatacctatgtactctgtccttccttagcgttgataatatcggcagcttcctgtacggtaagatgattctctcgaagcagctcatataaagcttttaactcctgttcctgctgtctggcagccacctcgtccctctgccggcaaagcgcgtccagcctgccctggacctttgctatctgttcatccagcgccccgagctgctcctcatacgattttgtccgtctggccatttaatactccactccttcgtccatattttagattataggtaaaatatatggacagactccgtcaaatatgaccgaatcactgcaaaaaagcggctatcagtatttttactttattttctccagaatgatatgcgcgatcacttctgcgccgcgtccatcctccctcatatctgtccgctccataaagtctctgcattcttcccggtattttccggcatcaaaagacaggatccggcaggcaagctcctcttcgctgcgtgccgcaggaaagggcagttcgtcgaatgaaaaatacagctctctttcttcctccacatattcattcaagtctttagcgagcagaaacaccggcttccctgtcagcataaactcaaacatgctcccggaatagtccgtgacaagtatgtctgccgccgccatcagttcctgcatatctggataatccgtcacctccctcacccggtctccttcctctgcctcagatacaaggtccgccacatttggatgaagtctctcaaagcatacatactttcccccgaacctcttttcacacgctttaaggcacggcccggcgcagaaccggtatacttccctgtccgccctgctgcggaaggtgggcgcatacagcaggatccgtgtatccgcctccagaccgtaagcccctctcaccatattccggaccgcttccggcggacgcatcagaaccgcatttctcggatggccgcagcggagcacctcaccgttataccagaaccttttccggtatttttcctctctgaacccattgttggaatacataagatctgtggccgccgcatcctttcttgcccgtttcacatatgagcggtccagctgcgccgcgtctctttcattctttttaagtccgagagacgaatgccatgtctgaatataatactgctcctccttttttggaacacgcattgcacttttaaaattatctacccatacgccggctgtagccagctcatagagcgccctcgcacctccgtacttcaccggccggattcccggcggaaactcttctgtcaggtcgtgtgccagccagaccagatccagtgcttcttcgctccttaacagttcaagtgcgatatacttcggatcgcatccgaagccccgcccgccgaaattgtcaaacactactttattcttctttgccggaagtacggccagccaccttaatgcatattcacagacagcgctgtacaccttccggagccatccccgcccaaaatattttctcattccttgtctcctttatgccatatcctcattttacctctttggacatataagaaagtttatcccgttctcgtacacgatcttctcatttgccaggcggaggcagtaaggctcttttatctcctcttcactttccctggagatctgaatccctacggcaataccttctttctccccttcctcccctgcaaacggattatcggctgccgcacggaaggttcccttttctttgtcttccataccgccgccggcttccaccctgacggtcttctccccgcacttcagaacaaaatatacatgatatgccgggctgagcatggcaaatccgctgttcctgacatccgcctctatttgtatcgtctctttccgctcataattcctgtctgtttttaacgtcttgacccacggccggcatcccagatacatcttaatatatgcatcgcccggcatgcccccgtatttttgcccgccccacagttcccacacttcatagttatactcctgattaagataagaaagactcagctgacgcgcttcttttactacgttgccaatctgtgagaactcgctcacgaacggcatctctccgccattaaacggaaccttgatattctctgccgaccagatgaggtcgtcctctctgccgtagtcttcccggtatgtgcccagatcgctctcactggagaagagcccgtcattgtatactccaagtctttctgtatcaagtccccgctctttggcctcccggataaatttctgacgccgcactgaaatgggaatggcacggtccagtgttttttcccactcttccaccacttccatccggtagcgcttctcatccatgtatctgctctgcgtccactcgccaaaagcccctatcatgccggcctgtacgcccgccagacagcttttgtgttcattcagcacttccccgatctgccggatatgcgccagcattatctcaaatgcagggtcctcatattcgccggcaaagtcatatgctgcccggaagataacggaaagcttaagttcctccgccttatcaagagccctcgaaagcttattaagcttatcttccgggatcacatcaagctccctctcatcgtccagatcataagtgagcagaacgacccggcaatccggatgccgtcttaccacatcacccagtccttccgcatcccctgcgctccattggaaatatgccccttgataaggatttgctaccatatcttccgtctccttaaaataaaacgtgcggacggcattatactttgacagcatcagagctccggctgccagcagggctatggcagtcagtatccacacgtttcttctcctttttgttcccgagtttcttctattcacgtgctgtcttacacctcccggaatattttttcaaaaatgccggcgatcaccccatacatcctgggcgatgcgcgatatatctttagcgccgcccggtccgtcatttttgcagcgtcttttatattctcccggtatgccctgtagccggccagccattcttctctcagacgcgccgccagatcctttctctcgggcagaaagacggacaccctgtaccatgcgatggaaagctggagcagataccgtttctcggcatatttttccagctctttgtctccctctttccggaagtaatcaaccgcttcttcgagggcgcgtatcttatccagccgtctttcgctgtagctgctgttcataatactgtccccgcgctggagataaccgtataatgcctgcggcgatatgacgaccttatccgcgatatacaacactcggtatgtcacaaattcatcctcgtgcgtcctcccctgcggatactctagcagcggtttcagccgggcatggtaaagcttcccccacgcggtgatcatctttctgtcattctctgccacgattttgtacaccgcttctcttcctgtacatatccggacggatgttttcactttttcggaacggctttttcttcccccgtcctcccatacggaccgatagccacagactgacacctccgcgccgtatttctgtgcattttcaaagagcacttccagataatatggatctacgctgtcatcactgtcgatataagtgatatactcgcctgacgcccgtgcaagccccgcgttcctcgccccggacaaccccttattttcctggtggaacacacgtatcctgccgtccttctttttatatgcatcacagatcccgccgcttttgtccccggaaccatcatccaccagaataagctcaaagtcccgatacgtctgttccagaatagaacagatacatttttctaaatacttttccacattataaacaggaacgataatactgatcattcatttactcctttatttaagcactgacgcggcatatcttttcatcacaggataaaagagatagaacagcatacagacccattccacctttccccgtcttactgcccgcagacagagcgtatagaacaggcgctgaggcagagacggaagttccctgagatacatggacgcactgcagtttttcactgtttcgcttatcttttcttcctctgaaaaagtacatgctctgcgcctgagcgccgccagacttttcccttcatatggtatgttcttgatgagcgaccagcagaaagtacgcgcggtcagaggaatgaccatatccagattttcctccagcacgccgttctcctccagatacaggataagctccctgatcatagccgcgcttttcgtatgtacgtcactgtccggctttcttgtcgtggacggatgttctgtcacgtaatagcagaccggacagtccatgcagtaaaagacaggtcccctgctccatactttcaggttaaacaggaaatcctccatgttcaccttcctgatatcgtccatggccagatggttgtcggtcagaaattctctccggtacaacttgttccacacatatccgaaggcactttccgtcttgacgcagtggtatctcttcacctcatccgggcgcccttttcgtctgatatagccgctgccgggcacgtggacctgttttgtccctgccttttccacacggtaatatccgcccatcgtgacatccgcctctgtttcttttgccttcttatacagcctgtagactgcttttacgtccacccagtcatccgcatccgcaaaacagacatatttgcccgacgcagcctggagcccgcagttcctcgcaataccctgtccgctgttttcaatgtgtatgatcttgatccgcgggtcattttttgctgcccggtttaaaatattccatgtatcatcatcggagccgtcgtcaataacaatgatctctattctttcatctttattccacttcctgatctcaccgatacactttcctacgcacgcctctccgttatataccggtataataaaactgatctccataaactcacccctgtttttttcttatcattcgcagcgccagataaaagagtatgtaacaaatatttgccgctgcggcgcacgccgcccccttcaggagaaatccccctgttccgctccctgaaaagcagccggacacaagcccggcagccataaacgaacatgccatctgcagtagtgtaagcacctgataatagaattcatttatgtaacttttcttaaaatatctgtatactacaagcggttcataccagaagagcgttacagcggacgatatggtcgtcgcagtcagaattcccgcaagtccccacattttccccatgataaaagaaagaacaatattgagaagcccttttataagtatcatctgctttatattgcggaaaagccccgccccttctctgtacatcttcgtcgcaaacctgcacgtttccagataataattcacgataatgataaggatgatctccttggtcagccgcggcaccgagcccatccacaatttcaggaaatcctgtacgagataataaaaacatacgacagtcgctcctgtcatccaagagttcagaaacgagtagaacctaaactgcgcatactgctcctccgttccctttacggaaagcatctggcccaccctggccgttatcgcctcgtaaaacgcagatacaagactcgtgatgccggcaatgataaactgataattagagtagactccgaccatggccgtgctgatgaacctggaaataaatatattatctgtattgcttataagcaccttgccaaaccggtacatcaccatgtcagatacattggacttgatccgttctgtctccgcgctgcccaagggctctgtatatacgaaaagaaacggatagcggcttttgaggtaccggccgaagatatggtttatgagaagatttttaaacagaatgcagatgacaaacgcctcatagcttctgaaaaacttcagcacaagaatctcggcggcaagcgccgcagcgtccacaccgcctgttacagccgccacaaaatacctccgctggtctgcctgtataaaataatttctcaccatgtacctgttataaaggacaatggagagcataaacgtcagaaatgtgaccgccacctctgtgtctttgatagaagcattgactgaaaaaacagcaggcagcgtcgtcagaatacctgctcctgtaagtatccaagtcatctttttatagatgttgtcatagtgtctgtaaatagctgtaagctgcgctttgtcgtttctcgccagcggcccgtaaaagctgaacagcatcgccgtgcctgcgccgaaataagcaaacgataacacgtcacagaagttagaatacaggctctggagccccagatactccacgttgagataaatacagatcacccgttttgagatcagattaataatgagcgaaacaatctggctcagcatactgacgatgatattccactgcatcaattttctgtctctatcctgccgcattattctccttctttcgatagatgatcttccctttgctcgatgatttcatcgtgtcgatcaccttgtaatcgcagaagataaacgtatccagattacgttctatccatcggatcctgaaaaagctgtacgtccatcccgccagcatgccgagaaacacgccggcgccccagaatgggacagaccacgtactggagagcaggcttgcggccagtgtgacagcaaaaaacagcgctcctgttatcacagcccctgtcatatctgcaaaatagtaaagatatatgatattgccgtacatcatgaatatcccgaggaacgccacgacaagtaccggatatatggccatcgtgacactgtcaaaccctatcttcgtgccaaagaggatgaggaacagaaatatgactgaagtaatcgccatctgagtaccgaacacctagatgatctgctgtgacaacgtgcggaacagctttttcctcgccttcacgatcatcttgtacgtaccgccgatcactccctccatatattccttataagcattgtggaaccttgtctccaccacgaccataaatgaaatcatgactgaaatatttgtgaacattgcaaggcatgaagccatatcatacgcctgatggctgtaaaatgtagacgccacaaacagacggctcggcgcggtccagaacacaaagttatgtacgtaaagccccagaatgtagaaaagatttgccgccagcagtttcttaaagattccaagataaggcagacattctccgtaagcccgggacacactccggaagtatctcttaatataagagaaatccagcactgctatgaggaaaaaccccagcgacagaccatatataatggagtgtaccgcgtcctggtccaaaagcttataaaacgcgaaggccgacaggaagcagacaaacataccgatgaaaaaaaacaatgcgataattttatagtccttcgtagcatgaaggtaggtgatcgcaaaaaacaggatgacgagggatatccactgcacgtaagccgccagaataaaaggaatgtcgatccctccccttactctcaggctccatccgaccggaagaaacaaaaccgtcgccaggatacagcagatcgaattcccggtataataggacgccagtatgttggaatattcttccgtataaaatttatccgccagataccgggaaaagacaacgttaaacggagctgtcagtatgacagaaaaaataaaagtgtacaaaatggtggaagacaaaagctctctgtccgcataggacaccttcgtcatgccgagaaaaaagtagagcagcaaaatagcggcgatgaccatgagcataggtcccaccgtaacgacagaactgtacacgacccctagcatcccccttgatatactttcttttctgtaaatcttttttaactcaaatccgataccagccattatctgccctccctgctctttgtcatctcttcataaagacttcggtatttcccgaatacttcttcttcgtcataatacgctctgacccgtctgtatccggcctctcccattttcctgcgctctgtctcattctctgccagtctcagtatggccctcgcgatttctgaaacgcccatcacaggcacgatatagcccgcatgtccataatcatcccgctccccttcgatgagccctctgctgtttcctacattcgtcgctatgcatggacgtttggcagcaaagccttccagtatggacagcggctgtccttcactgatacttgtcagaataaggaaatccatctttccgatgtattcttttacatcgatcgtccctgtaaagaccacattttctatctccatgtcgcggaccatgtcacggcattcctgcgcatattcttttgcctcttccatgcttcccatgatccacagcttaagcttcggattcttgttccttgcaagcgcaaacgcgctgagcatcgtcttgacatccttgatcggcgtaacgcgcagtaccgcgccgatgttgatgcccctgtcacctgcttctttcccggggatgccctcgtacttgcggtaatccaccccgtttggaatcaccactgtcttttcctttgcacatccaagttcgatctgaaacgccctcgcgtcgtcaaaaagtgacactaccctgtctgcatattcgtaacagcattcccctatctttttgaactggtcgatccatatatccttatagatcccgctcacccagtcggcttttatgatctcctcctcccgttctcttgtgtacagaccgtgctcgctcatcagaaaaggcgctccgtgaaggcatttctgcatacttccccaaattccggcataaccgcttgatacggagtgatatagatctgctctttctgtcctggacttaagtatggtaaacagcggcagataaagagaacgcatcgtccagaggaaatccgaaaagacgactctcctgaaattggcattgtaatagtcaagggacatcttaaaaaagtccttccccgacagcagagcgttcaatgagacgtccttctctgcaaaaaagcggatgatgacgccccagtccggactgctttcaaacagcagattttcaaatgcatcgtattcttcccctgtgagggagacctttttctgtgtccggttatccacataatcatcatccagcagatatacttcctgaatctcgctgacattggacggtattttatatttgaactgctgcctctcatcgggggacgcagctatcgtctggacgacaaactccacatccggcatactgagcataagcccctgcacccagctggacactcctcctgtaacatatggatacgcaccttcaacaattaagcaaactttcatctttccttctcctcatattcaatactcacatgttcatctgctgcttccacgagatagaagccgtcatacagttttgtaagctctgcatttttcaccgtttttacagttccgggcagcgacaggtaaaaatatgccctgcctgtaaaattaccgatgtcagcatctattcttgtaccggagtaatcgatctttggctccatcatgtcaaaagccttcaccctgtatatcgcctcgcccacagtgacccgctcaagccaggacagatgttctttctctactccaagtacagtttccatactgcggcagaagtccacccagtcatcttcctcctttttctccggttctctcaggaacggctttacatctgcgtagacggcgttaaatccggctcccctgcacagccccagattgtcgaagatcacattgtcgtatttctcatcttttataagattatacgggaggcacacttcccggctctcatcatccgtccactgaaaagaggatgtccacagcgcaagcctgtttccaatcggtgagtctaccgtctcttctgcgccggctgttcctatttcgtcctttttttcttctatcccttccagatggtacttaagcagctcattccctgtctttttcagtttcttcttatcggtactgtaccaggtcgtctccgccccgtagcgttcttcacaccgcttgaattccggaaagaagatatcgttttgaacgccaaggctgtctctttcatattctttgtccagaaactctgacgagaactcatctgtataaggcattcctgacacggcaaagcagtacgcgttgatgaccggatacatatatacctgatacagatctgtaaacagaaagctcacggctgcatacccgacgggcccgctcatcagctgtcggtccgccacatagacactgccgcagcttacatttcttttataccgccagaatacgggcgacagattctcacttttgacgtctcccttttccagggccgctgcgtacacttctgtctggggctttaacgtcaccgctttaagagaaaacttttctttattctcagttatactgccaaacaaaagcttttccgtcagacggatccccgtctttttctgcatccctttatacctttctacccctgtcagactccttactcccgcgtcttccagggcccccgcatcaggtatatttgtaaaaaacagcgtcatccccgcctcattataccggcgcaggagttcgatctcatcctgctggaaaaaagtccggcacacaaacaggatctcggcccgcccgcagtcctcaagctgctcttttacctggaacttttctttcatattctgaagctgaagcgacgccactttaaagccgccgccctgcccccatatcatgatatccgcggcttccttctgccggttttctgccggagcgttctcctgctttccggcaagcctgacaacctttttgtattccgcgcgctggtccacttccaattcatctttcgcctgcaggctcctccaaatattgttcaggttccccataaaaaggaagacgcacagaagacagaaaagtatgacgaccgtgtagacaaatatatatcttctgagctgattatttttggaaaaatctaatttattcagcagcttcatgttctgctccctgtcttgcaccgcacataagcattccatgtgccaagcagcattaaaatcatgtattttcctgctttcagccagcttgaatgcatggattcacctgccgtgcgctcacacattaccgccggcacttcctcgattttgaatccaaggagaagcatctgtacgatcatgttaagatccggatatttcaggtcaaaattgttgtatctggagtaaaaagaaaatgcccgcctgttcagcccctgcagtccgcttgtcgggtcggtcaggctctgtcccgtcacccgcctgatgatccatctgaaacagctgatggcgcacttcttcatcgcagaaatatgaaaagacttgcttccttccaggaatctggagccgatgacaatatccggatgtcctcccttttcgctgccaaaacagccaagccgttcacacacggtctttatgttcgacagatcatgctgtccgtccgcatctatctgaagcagatattcataatcgtttgccgccgcgtacttatacgcagtctgaagcgccgcgccgtatcccatattaaagataagccgtatgaccttaaagccggaatcttctgcgatctgggctgtgtgatccagggatccgtcatcgatcacgagaacgtccatgaactcttttattcccataacgctcattccattgaggagtaaacctatattctcctcctcattataagccggtataattatcagtattttcttcatttgatctcacctgcgctttcccttgccagttgtttatagtctacggacaggtttaatgtaaaataggcatcctgctcaattttatacactgtgacctgttcgtcactgtaatattccgatacatggttcggatatatctgcctgatcgtctccatccagaaatgcagtttggacattacaatattcctctgaaaataatacggagcatccgcgccgtgcagcgcatcctcactcacatcccagtccacatcctgaagtgccaggacgccgctgatctcacctgtatttttcggcgaagcggcatcgcttctgtcaatctctctgcggtcatctagaaatgatatcggatggtgttctgtcaccacatagatatccggtgtcggtatatagatccgctttttacccccgtctatttctttcagcagatcaacgatctcatagtggaagccgttatatcttatgaccgacagatcattcgtaggtgacaggacggtccacgtattgtccttatgctcttcacacagcttgaggcagaccctcatatccccttccgagatggtgatattgaaataccgctctttttttatcctgccggagtttatcagccctgcgacgctgccaagcacgataaaggtaagtaagaattccgcgtgcctttcctttacgccggccttcctgagaacacagaagactgcttcaaaaggcaggcacaaaagcgggatcgtaaaaaatgtcaaaaatgtcgccatacgttttacttctattacagtcggaaggttcagataatacgtacaggaaaggaatgcgcacacctgccacagaactgcccagaaaagatagccgagatatttaagctttgctctgcgcgacaggatgatcccaaagagggcgtatgccgccagcgcggcgtccagcaccataagtccccgtactgtttttttgtccgtcccataatttgcagtcagatagccggtctctgcgtcaagcagctccttcacaagacctgcggcgttcttctgattcctgatgtcttctgccgtgacgccctctttcttcttatcagccggagcatccccgctctccgacgcagcggtcgtatctacaattccaagcgcccatgcgatagaacgttcaaatttatagccgttcagcagaccgcaggcgtacggggcgcacgccagtataactccggcgaggccgccggcagcaagacaaagcagcagtttctttttaagaataggaactgcaaacaaaaggccaaagcacagacagatgatcagacataagatggtgatgtaaaaatgggccatcagcgtccatgcgatacacgccgcaaataatatcagatcctttctgtccttttctcttatataggaaaacagggcgtataccatgccaaaggcagctacaaggccaaactccatcggaaaggagaactggaaacgcacatacgataccgatgagaaaatgtcggccagaacaaacagactccagcctcccaaagctgcaaatctattcgagaagcatttcctaaacagcatgtaggccgccgcaaatatcaaaatgacagacaggaccgaaaagtttaaatacactctcacgaaattgagcggcatcagaaccccgagcgccgcattcagagtatgtaccccatgtggatacatgcccgcgggaaaaatatccccgtgtatgagcgaaccgatccagtacagatgtgtctcttcatccgtatgtccataggccgtattgtgcagtttataccagccgtaaaaccacacgatccatgccatgacgagaccaaaaagaaccatttccataagattaccgttcaaaagtcttttcttttcagccagatatgatcttatacggctgtttaccctggcacgcaacacatgaaatccatacgtgccgatgatcagctccttcagcactttgatccacttcctgtaccggacggctattctcttcctctctctcaccgcagtcagcgacagcggcagaagtacaagtgtaaaaagcagagacgcaaagttgacaaaatgcagaaagccaagcagcagaactatataattgatataaaggtttcccagacactggtaacagaaaaagcggaaggtccgttccttctgcgccacatatttcccaaggcataccgacggcaacacgagcgtaagaaaaagatagcccgccatgctccatatgatcgtccatacattctcccatatcatcagtatctaccatcctgtccggccgtaaaaacgcacccactccagagcttccccgtccaaaatcagcgaagattcccggatctgctttacggtttccctgaacctcatctcatcccccgaggcaaagtaatatttcagtaccgctttgaccgcgggcaggtccgattccatatattctccggcacgctccgcccatttgccggcacaggcaccgtccccgatctccatccagaatcctataatatcggccagcatatcgccgctcagcttttctttgtcttttctgtaaagttcctccagataaccgtcaaaataaacgagatatatcctctgttcaggaacactcagcacatgtttgtgaagcatgttactgcagaacctgagatagatcaggagggcatccgcatctttgcttttttcatatatttctctaagcctcttctctgtctctttgtacctggcgatcgcatcggtaatgtaggaggcagcatagtggacgacctctgagtctccctgcgccatggcgccccggatcctctgcatataatcttctgcgtcaggccgcttcagcacttccagaaatgactgtcttctgttcgctgtatccgatattatgagcgcctcttccaccggcacccggtccacttccttctcgatatcatcgctgatgatcatgcgggtcctcttcttactaaagctcagttcctcttcattcagtagtccgtctctgcggcggaataacacgatgtttactgcctcgctgtcggccagaaaaaccgccccggccagcggcgtaaaaaacataaacgcagccagcagagccgcctttctgtattcttttctgacgacgcccctgtaaagaaaatatatgagcgccacacacgtattcacaataaaaatccataaaaacaatctgttattcaagctctctactcctatcatccgactatactgtctacttgtatcccggcattctgaaatctgctcataacgtatcctgcctcatcccggcttgtattcgccaggattatgtacaggtctcctgctttttcaccgagtatgtctgtctgcctgacgagggaacacacctttttatatactgcttcattccgacccgccatcagttttcccggaactttcagcattgcatactccagcttgttctccgccgcgcctcctttatatatctcttcgattctgttaaattcctcttctcttagtacatccgttccttctatgtattggtccgcaagcatgttccagtaggtcgtcgcatggttcatggacgactcgatcagcctgcatatgagcgcaagtgtgttggcttcataaagatttactttcgtgagatctttcgtccagagcatgatgaccgcgctgagcttttccttctcatagattccgcacgcatatgcgggtagttttgaatctatttcacggtttctgtacacggttctttcaacgagctcctgatgcataaagaaatcactgcccgcgtacagagacttgccaagctctctcgccctctctgaggaggctgctgccagacgcatatagtcagaatttcctcctgtgatatagacagcggcatcttccatctccatcagttcgctcaccacgtcgaccgcctggaaaataactttctgaggctcccagaagtccagtctgctggcaacttcatatattctgaccatactgttttcataatttacaagacgtttttcatatatttccttcacatatctgttgccgtcatatattctcgtcatgtcgacaagctcgctctcataatacttcttctcatcttccagatcgccgttgcttcttttgtatttgtcccgcatatagccgacgagaacgccaatgatgagaatctgcagaagccccgtgaacgccgcatattcaaacgtctctcccacaagaaacacttcccctattctggccagcagcgtaagaagcgccgcaaacagagagtgcgcacaaccgtatacgactgcgatgacaacgacataaataagataaaaatccagaatactgccaagccacgtgtctttaaacaggtaatataatattgtaacaatgaaaaaaagtcctatattctccgcaagcgggataagcttttcccggactacggactttttcgtctcttctcttatttcaagctctttttccttttcatagatcttaaataactccctcaaaccgtcttccaggctgtacttttcgtatgatcccagcttttcattactgtcttttcctacggccggcagcgctccctttgtatattcaagctcccggacatctgtcttacgtccctgtacgacattctccaccgcttccaggatctgtctctcggtatatacggttcccggaatgagataacaggattctttctcttcctgcataaacacacgtacgagcacatccaccgcatcttttacatacagtatcctgtgctgccgttctgcctctatctccactgccggacttccccagaaacgctccataatacgggaacacacattataatcatgggttttgtagtctccgtatatctcaggataacggataacactgatctgaaattcacccggccggttttgttcctcacacatatattctgtctggatgacagtctgcatgagcacagaacctgcttcaaactctgtctcattgtctatcatcccgcctcctgtattttcgtagactccgagggaggaacagtagatcacctgacggatccccgcttctcttgcactcatcaggagatttgtgacacctgtgagataacgtacggattcctgtccggtgtccctccacgtatatttcgtgtcacagatcccgaggattatcataatatctgccttaatatccttcatgacagtacatacatttttgcttctgtaactgaaattatattcctggaatactccgtttctcggcttttcccggcggttcttttccgagcctgttatgacaaatatgtcatggttctccttcttaagccttgtgatcagctctctgcaataaattccatactctccacatatcaatactttcatgatttctcctgctctccttttgtcttacgttctatctttgttttcaggtccttattctcgtctttcagcagtgtcagctgcatggccagttcttttatctctgtctccatctcggagatcgtgatcgtgtggcgcaggatgatcaatatgatcactaccagcaaaaagaatatgagggctgccggcggccaccatatgccgagaatatctgccgcccatggcagaatctgcggaaataccgagagcagaaggaggccgagaacaccgccgagccagagtaccgcctgattctctgacaggtttctctttttcatctccagacacagcccgtaaaacatgagcagacagaccactattgaaataatttttaataaaatgctcaattatgtatttcctccccctcttttcatataattttcctaattattccagaagatgaattggaaaacaacaaaaaccctcatgaaccgttttttacagccttaagccggagtataatggtataaatttcctgatataattacctttataaacttgctgtgacgagtccggtacaaaataggaggaattgaaatgcaggctataatatgtgatgattgcgccgctgaccggcagcttttgatagactactgtgcaagatatgggaaggaaaaccacctggtgatcacagctgcaggtatggaaaatgcgggcatgctgcttcgcagccggaggtcaagaaatgctgatgtactgtttttagatatctatatggagggggcgtccgggatcgacgccgcccgtatcctgcgcggaaaaggctttcggggcgcgatcgtattcacgacaacgagcagggagcattatgccgatggttttgataccgacgcctcccactatctgctgaaacctgtatcctggccatccttctgcgaagccatgcgccgcgtccggacaaggctgaatgtatatgaccgaacactgcacgtgacctcggagcgtatggcgcttgatatcgcggtctccgggatccagtatattgaagtatacggacataagaccattttacatacgtcaaaaggagatgtcactgtgagccagtctttgtcttctctggaggaggcactcggcggcatcccttttctcagatgctaccgctattttattatcaatatggattatgtacagaaaataatggaggatagttttctcatgaaggacggaagaagaatccccatgtcccgcgacagacgggcccggctccgcagttcttacatgagttatatttttcagagaatggagggaaaaagaacatgataggtagtataagccatttttttgtcatttttgtccagacagcggccactgcctgtttttgtttttatatctttcacgacatgctcaaagcatgttttgcgcgccttgcagtatatgctttttttctgtgctgcttctgcggatttctgtctctcgctgtatgtgagatctgctcccgccttccgcttgacgttgattctgaacttatttctctgttcataatgttcatcatcggatacttctgcctccgttcagtcgtttctgagaacagcaaccgtattttattcgtcctttatctgtcgctgcacgtgcagtacctctgtctgagcgtcacctatctcgcctatgcggcgtggtttccggcgctgtcggtcaattacggctatgtcccggcagacgtacccggctacacgctgcccatccttctgctcggccctccttttgccgtcattacccgcaggatctatacgactctcagacaggccgatgataccgtatatcatcgtatctggtttatcccgctgctgtttctcctgctctattgtgttcaggttctgttctatccggtatcacaaaaggacactcaggcagaggcaaacctaatgaggctcatcatctcaatatgcgcttttgtgacatattcacagatggcaacggcagtcgcccagtctgcaaaagccacaaaagaaaaggaaatacatacccagcttgcccaccagcttgacctgcagcgctccagaatggaagacatcgagacccacgcggaggaaatccgccggatacggcacgaccaccgccagcacatgcaggtactcaaaggattgctggaaaacggcgataccggcaaggctcttgattatctgaacggttatgagacaagtaccgccgcaaatatccaaccggtattgtgcgaaaactttgttgtcaatacactctgctgccgttatgaaacactggcactgcagtcgggcattgccgtgacccgcaagctgaaactcccgcaggatatagcgatcgcaggctgcgatctcgccgtgatcgtgggaaacctctgggaaaacgccgtggcagccgccctggacgccgacaaggaacaccggtttatcagtctccacatccaggaacgggacaacaccgtgttcatacgtatggaaaatggctacggcggtatcatctatcagaaagacggccagatcctgtccaccaaaccggaccggaacaaaacgccgggcgtcggcatagccagtatcaagtctgtggcggccagatatgacggcatggcagattttgtttacacaccggagattttcaccgcgtctgttctgctgtatactggagtaaaatcagcgctgtagaaatttcaataaaaaaggagctgctaaaatataacagctcctgaccatttttattcttttaacttagatattaatatcttacagttatcacaataatatgcctccataaacgggcggtcctctataattgatgtcagcctgatgcctcctccaaacggaaatctccgctctgacggaacccatttaagggcgtaccggtcttgccatattttacctggcttcatgtttttattacaataaggacatttcatattattaatagttttcttcctaaatttgctggtttccagttacattttgtaacgtgtcagccgcaggctttatcaaagatttaaaacggtgtcccgtccagatcgtaaggggtcacctgatacacgtaataattgagccagttcgtataaagattgttggcatgcgctctccacgtgagcagcggcctgttctccggatcgtcgtccggataatagtttacaggacattctatctccagcccttttccgacgtcccgcttatattccccgtccagcgtgatcctgtcatattccggatgtcccatcacaaagatctggcggccggcctgcgccatcaccagaaacgccccggcttcctcagattccgcgagcattgtcagcctctcatccgcgtgtatcttctccgccggcacgtccgtatgcctggaatgaggcgcgtaaaatacatcatcaaacccccgcacgagcggtatcttccggttcatcactctgtggcggaacacgccgaagcgcttgtgctcaagaggaaccttgtcgatgccgtaatgatggtacagccccgcctgggctccccagcacagatgaagcgtggaagtgacatgtgttgtcgtccagtccatgatctcctttaattcctcccagtagtccacttcttcaaacggcatctgttctaccggcgccccggtgatgataaaaccgtcgaacttctgctcttttatctccccgaaagtctggtaaaacttgttcagatggcttgtcggcgtattcttcgactcatggctcgacacattgacaaatatcacgtcaacctgcagcggtgtgttggacagcgaccggagtatctgaagttccgtctcctccttaagcggcatcagattcagcagtccgatcctgatggggcggatatcctgatgtgtcgcccggaactcatccatcacaaatatattctcgcgctctaatatctctttgaccggaagatcattctgtactctgataggcatctttattttccctcactttcctttttctctgtcttgtactcttcggaatggatatattttccctgattgtccacatagctcagcatgtcatagtattttgagtccgccggcagctttttccgctcaagcttgttgttcaatatcatctgtacgatgtagtagataaccgcaaatgtagggactcccatgatcatcccgacaaatccgaacaggcctcctccgagaaggatcgccacgatcacccagaaagccgacaggcctgtggaatcacccagaatcttcggaccgagtatatttccgtcaaactgctgcagcagcagtacaaagagaataaagtatatcccttttaccgggtctgacagcaatatgagcacagcgctcggtatcgcgccgatataaggaccaaaaaacgggatcacgttcgtgacgccgatgatcacgctgacaagcaccgtgtaaggcatgttgagaatggaaaggcccataaaacacaacactccgatgatcagtgaatcaatgatctttcctataataaagccgccgaatatctcattgctctttgtcgccaggtgcagcagcatattgccgtgttccggtttcatgagcgcatagacggttttcttgctctgccgggagaaggtctccttgctgaacagtatatagatagatatgataataccgatgagcgcattgatgatctcactgatgatactgatgacccctaccgtcagattggacatgatgtcattcgccctcgtcagaaggtccgttctcagccatgtctgcagcatgtctgtcccttcctccactgcggtcttgatgagcgcccctgtcgtagagtcctcaagctttacattgttaagcttgtcaacgagctcattgagctggcccggcagtgtgaatacaagattacgtatactggaatataattccggtatgagcagattgcacagcgtaatgatcaatacaaagagaataatgatggacagaaatatcccgcatgctctcgaaagctttcgcgcgccgtcgtgtttttttatcttcatttcaaggaccggtctaaggtagttgtctacctgcttcacaatgggattcatcagatacgcaaacacacagccgtaaatgacaggctttagcacatcaaaaatcttcgtaaatccttccgacagattcgtcagccgcagcagcgcaaagtaaaacaaaatacttgccgccactacaagaaaagccgtcattccccggttgaactgctggcggatcttggacggaccctttcccccgaaccggggctgttttgcataatagtcagaacgctttcctttttcctgacttttttcctgaccgtcttcctggttgtttttattttcattatccatttaaatgagcacctctctacgcaattaaaattattataccctctgtacaaaaccgcgtcaaccaaaaagggaagcttaatgcttccctttttatcgtacgatactatgcttttttggctttgatccgttttccgtccgggccttcgtattcccttccccatccggtcagcacggagaatacaaacactccgaacagcgcgatacagtggaaggtagcccccgccagggcgatcggatttatggcctgtataaaagaatattcctccatcagtccggtgatacagctgatcacaataaagataaacgaactggtgaacgggatgatgaccgacagcgtgctggcaaatccgtccagcaggttggaccgccggtatgggtgaagcccgctctcctgcccaatcttgtcagcgatcggaccatacattatgatggccggtccattggcggaaccaaggcagatagaagtaaggatgataccgaagccgatgatgaattcagaaccgatgatcgacttgttcagcttgctctttagcagcgcatctatcatcttctgcatcattccgctctcattgagcaccccgataatacccgccaccgcatacagatagcctaccgttccgagcatgttcttgataccgtctatggcaaacccggcgagcgctccgtcttccacagagacgatatcagccggcgtaaggatccccgccacaagtccgatgactgtaccggatatgatcccccatgtgactgcgataaagatatcccgcttaatgatagctactgtgaggagtaccgcaaccggaatgagcatgataagccccttcgggtctttgtaggcttccagtatctctttgccggccgggtcgcccgcgcccgcgttgccgagcacgaggaagaggccgcatgcgatcaccatggcaataagagcatacttcatacgtgtagctacaacacctccgatatctgcagtaccttttttgttcttataactctgtgacgcggcggatgcgatcgttgtgtcagatataggcgcaacattgtcgccgaagatggctccggacaggatcgcgcctgccagatacagcggatgcgctccgagcaggattcctgacgggtagaggatcggaaatcctgagaacagtgtaccgatggatgttccggtcgacatggatatgatacttgtggcgataaacgcaaatacgacgaacatgccgccgtgcagtcccatggaatctccgagccatacaaacccctgggcaacgccgccccttgacatcattttggcgaagattcctaccacgagcagaatcagggcaagtgtgttcatcatctcagatgtcattcccttgacaacagcgcgccagtaacggctccagtcctttgagaacagacttccgacgatcagcacgagtataccgcccatacagaggccttccatctcaaacaccttaaagaccacaaagagcatgatacagacaactacgaacaatatgagtggaagtacggcaaaaaagctacctcctctgaattccaaacgtttttctttattttcttccataaattatgcaccctccttttcctttaaatttttcacacggttttcaaaataattagtcccccacacgctcagtattatcaaacatccccccacgatctggtaccagtataaatgttctttcacaatgagtacgccggccgcaatggatatgacggtggcaagattgataaatactgccgcattgaccgctttcagctttgaaagcatatagttcatacagaaaaatgccacggccgatgtaccgatactgagctccacaactacaaacatcatttttgcagagccaaacggaatgagatatgccctccagacgtcccgctcgaagattccctggatgaatgagatacaggtaaatataacagcccccaagcatatcatcgtgtacgttatctcaacggatgaaaaatatttggaatatttccgcgagagtacgttgttgacagaacctccgagcaccgacacgagcatcagcagtattccgaaaaacgtaccctcgttcccgctgctcctggcaaatacgaccgtgaccagcacccccgtcactgacaggatgataaaaaacacctgtatccgcatcggcttttctttcagtatcacaatgccgaacaatgtcacgaatatcggcatgatcgatacaaggatccctgcctgggaagacgagacatactgcaggctgatcgtctcaaagaaaaacgagatcccgggataaaacaccgacagggcgatcacacccatcaccggcttatttttataactgatatgtatgacgccgaatgccctcagaattgtcataaaaaccgctgccagcgcaaacctgaagctcatcaggaccatagggggtatctcggccagcccctgctgtgtcaccagaaaggacagcccgaagaatactgccatcacaacacctgccgcatacggcagaatacctgtttttttcatattgccccttttcctgcccccgcatcttaaaatgcaggcattattcctttatccctgtccactacggccgaaccgtccctgtataccttccgtatgcgttccttgtcctggaggatcgtgatatccaggagagggtttccgtcgacaaggagcatatctgcggtctttcccggctccaggctgccgatatcctcctgaagcagcgcttctgcatttacagatgtggcggctttgatggcttccatcggtgtcatcccgttgtctgtcagacattccagttcataggcattctccccgtgataattgaacggagtgcccgtatccgtgccgactcctacttttacccccgcctccagcgccttatgcaggttcacgtagtgatgctgcgcgaacatttccacctttttaagatgttcttccggcacgccggctgtcgctccgtatttgatcgttctgaaagcgcacagcgtactcatgagaaatgtccctttttcactcattctgcggatcgtctcttcgtttagaaatgttccgtgttcgatcgtgcggacaccggcttccacggcattaaagcagccctcctcgccgatacagtgcgcggctgtacagatcccgttcttaacggcctcctgtactgccgccgccatctcagcgatattcagctgggcgaccgtagccggccccggagacattccccctccggtggccatcagcttgatgttgtccgccctgcgcttgatccgctttcgcgcgcactttctcacttcatcctctccgtcacagacttccgctatccagtccgcttccattgcactatgtgagaacatatccccgtgtcctccggtgatcgtaagcgccttcccgctcgccagaatacgggggcctgcgatcgtgccttcctgcacggcctgccggatatccatatcgatctcgcctttttcaccgcagcagcggatcgtcgtaaatccggccttcagatcttcctgtgctctttttacaccgtgaatgacagcaagccccgcattttccatgatcatattgcggaaattgtccggttctccgttcatacagagatgtacatgcgcgtcgatcataccgggcatcacggtccggccgccggcatcttccatctcccagccgcggtacatctcaagagcttccgccgtctccctgcccgcatagcagacccggccctcatccaccgccaccatggcgtggtctacgccttcgtctgccagaccgtctatgagaaaacaatttctgattatatacatttacaccaccgtctttctcagaacggcccgtagtcgagcatctgggctatcaccagactgacgctgccaagaaccgttactatcaacatgtacttccagataaatttcacccatttctggtatgggatctttgcaaaggccagacatgccatcagtacccccgacgtcggaaacagcagattcgtaaaaccatcccccatctgggatgccagtatcatcgtctggctgttgatgccgaccagcgctccgagcggagccagtatgggcatagtgatcaggaactgtccggaacccgagttgacaaggaagttaaacaacatctgtatgataaatatcccgatcaccgccagtgacggaggaagaattccaactgcctgagacagcgcatggatgataacatcaataatgcttcccgcgtccagaatgaccatgatgcctcttgaaaggccgcatacgatcgccgcggcgatcacgcccttggcgccgtctatcatattcgtacagacatcttcaaccttaagccttcctatgaccgctgcaacgatagccgcaatgatgaacaggccattgatctcctccatataccatcctctggagatgataccgtacaccatgaccgccaggatgataacgagcgcaaggccgatcagcttatgccggcccgtagcctcggtctcaccggtctgattctcgtaccgttttgccagcgcggcgctctcttcgtatacaaggctgctcttcgggtcctttctcaccttcctggagtaatgcaggacatacaggacacctgcggcatagaatacgacctgaagaatgatccggaaccacgcgccggaatacagcggaagtcctgtgatctcatccccgatgccgaccgtaaacggattcgtcactgacacggaaaaagcggagaaggcggacacaaccaccataccggtcgccgtcatagagtcaaacccaagggcaagcataagcggcatgaccgccggcagatatacaagcatcagctccgcgcccccgataatggcagcgataagcgcaaacacaaacatcaatatcggaaagatgagcatctcctttcccttcagcttctttgcgatggagttgatccctaccgcgatcgctcctgtcgcattgatgacctgccagcacgcgccgattatcagtatcgtgaaagcaacgagcgacgcccccgtcagcccctgtgtcactgccttgagcaggaaaaacggattcaggtaatctttgtccgtatactggaacgaatccgtcaccaccacctgcgacgtaccgtcctcgagcacagcccgctcatatgtccctgacggtacgatccacgtagcgatgagcgctatgaccatcatcagaaacaggatggcaaatatatggggaaactttctttcttttatcgatttcactttttctttcataggcttatttctcctcggtaatcttgatcagagcatctacccctttcgctcctttgcctttctcgtacaaaaacaaaggattaatgtcgatctcctcgatagatggctgatctactgcgagttccgataccttcaggagactgtccacgagggcatccaggtcatattccgtccccctggcccctctgattatctgatacagctttgtctcctttatcattctcaccgcttctttgcggtccaccggaagcaggcggagcgcgatgtcctgaaatacttccacatagatcccgccgcttcccgtcatgagcactggcccgaactgcgggtctttcttcatcccgacgatgacctccagcccctgcgcagccatctcctgtatgagcacgccgtcgaccgccgcatcggccttgtaggatctggcattctccaggatcttctcatatgtttcttctacctcttctttctccacgccgagacatacgcagcccgcctcggtcttgtgctggatatccgcggacagtatcttcatgacaacgggaaattccagttcctctgccgcccggaccgcctcttccttcgtcccggccaccatactctttgccataggcacgccgtattcagaaagaaggttctttgcatccagttcatttaaaaatctactcatccgcctcttcctcctgaccttttaagaattggccgtaggccgtcatatggctcatggccttcacacagtgggccggggtgtcaaacgtatgtatcccgccctgctccaggatctgcctgcactcccacacatagtttcctgccatgatacagatacagacaggttttttcttcccgtagccttcctccacgagcaggcggagcaaagcttctgccagttcccggcggggcaggaatgtaggtacgacggtgacgaagatcacgctgtccaccgcttcgtcatccatgactgctctgaggctctccacgtggtgtgatactgtggccgccgccgtgatatccgcatacccttccggagaacagatatttgccatcggcggcagaacgtccgcgagcctgcgctttgtctcctctgacacgagcggaaacttaaggatcttctcgtccacaaatgcgtctgtacagtagatgccagggccgccggcctgcgtaagcagaaaacagttccggccggccggtatcttcatggcgtcaaacgcctgcagcgtatccatcatatcctcgatcgtgtacactctgatgatcccaaactgacggaacgccgcatcatatacggaatctgctcccgcgagtgaaccggtgtgtgaattggccgcctcagccccgatactgctgcgcccgactttcagaataacgaccggcttcttctgcgcgatcctcgccagtgtgtcgatcagtttcctgccgtccgggtagccttccagatacatgccgatgacctttgtgtccgcatcctgttcaaaatactccagcaggtcgatgcagtccacgtccgccatatttccgatggagataaacttgttcatggagatcggcgccggaccggatgcgcccatcatcaggatggatgccgccatggccccgctctgggagataaagctgatcccgcctttttgtcctctcatctctttcggtatgagcgtctccacaaaggtcgtatccacgcggttgatattgtcgatgatcccgatgcagttcggtcccaccacccgtatcccgtacttctctgctgtctgaatgaggcagtcctgcctgcggatcccttcctccgtcttcgtctcgccatagtctgcggcaatgcacacgatcaccttgacatcacgtctcttctccatgcgcacgacaaggtcgtccataatgtcatatatcattttcgccggtgtcccgagcacgaccagctctaccgtctcttctatctccgagagcttcttgtaacatttccggccgaggatctcatcggcggacatcgtaacgggaaacacctcttttggatatccgatctgattcaggttatagatcaccgtatatccggccttcaaaggattattgctggcgccgatcaccgcgatattctcaggatcgaataatgcgtctaaattatgtaccatgtattcctccttctcccgttaaaggctggcaagctttgtgagtctgttccacttgcggtcaaccagttcctggatctccgcggcctcttcctcattcagatgtttgaacttcttcatgcggctcagatattctttcaccggctttggctccttgaatgtcttattgatcgtgaacgctccgttctccacctcatagagcgggaagaaattgctttccacggcaagtctcgaaacttcgatgctcgtatccggcctgatcccccatccggtcagacacggattgtatacgtggagataagccagccctgttttggacgcttccatcgccttctccagctttcgcaccatatccggtatgtacgccggggaacaggttgccatgtaagggatatcgtgcatggccatgaccatggggaagtctttcttgtgctgcttcttgccgcctcttccttccgtgctcacaggagtcgtcgttgtccacgaatattttgtcgtagcgctgcttcgctggtatcctgtgttcatatatccttcgttgtcataacagatatagatcaatttgtccccgcgctccgcggcgccggacagacactgcattccggcatctgtggatgccccgtctcctgcgaaagccaccacatttacgtccctgccctgcttttcataatgcatcttgatccctgccagcatggatgccacattgtcaagcagcgggaaaaaaaccggtatcttggagccggattctgtatcccagcccacgacacccacgcctcccatgcatcccggcggaactgcatagatcgtgttcgggccgagcactttcatacacgtgcgcagcgtcagttctacattacatccgacgcaggctgaaatgcccggagagaccatatcttcttttgacgctaatttatctacaatattcattctctttacacctgcccctcttctaccataagccatactgtctcactgtctttctgttctttcgcggtgcaaactaccgcatcgatgacgtcacccatcatctgaagcgagatatcctccccgccgagacctccgatcaccggcacagacggtacggtgtttccgccgtacatggcagcttttacttcctggtacacgattcctgtgtcacagccaaaggacacatttttatctaccacgccgaaggctttcacgcctgacagcgcttttcttattctctccttcgggaacgggcggatcatgcgcatacggatgaggcctgccttcactccttcttcccgctttgcatccaccatatcttttgccgcgccggacatggaaccggtcgttatgatggcatactccgcatcttccatccggtactcttcgactgcgcctccgtaggagcggccaaacagttctccaaattctttgtccacctcgtcgatgacctccaaagcggcctgctgagccttcaaatgtttgtacctatattccatcaaaagcgcgccgtttgtaagcgggtccactgccatagggcgctccggatcaagtataatgtgttccggacggtaagttccaagaaaggcatccaccttctcctgctcaggtaccatcaccctctctgtcatgtgtgacaggtaaaatccgtcataacagatattgatcggaagcagaacccgcttatcctcagcgatcttaaatgcctgcactacaaggtccagtatctcctggttgtcttccgcatagatctgaagccatcctgcgtctctgacgctcatggaatcctgctgcccgccccacacactctggggagatatcatctcacggttgacgatggccatcacgatcggcagcctgagcgtcgacgccctgaagtatggttcatacatcagggacagtccctgggatgccgtcgccgtaaacgttctcgaaccggccagggaagctccggtcaccacgctcatggccgacagttcagactccacttcactcatggccgcgtcgatctttccgtccgccgcaaactgtgtgagatactctacgaccggcgtctgcggtgtgatcggataagccgcgatgacgtctggttttgcaagggccgccccgacggccgcggccatattgccgtttaaaacatctaatctctgcatttattttccctcctccggtatcatcgtgatcgcatttttcggacactcatgggcacatattccacatcccttacagtagtcataacagatcgtaaatgttccgtccgtctttcttatagaattcaccgggcagtacagaaggcacgtgccgcatgcaatacatgtctcctggtcgagtaccgggcgctgtgtcctccagtcccctgtattgagcacatggatcccgtctgctcccacaggcacgatatatttacttttaaactccatcttctatggcacctcccttatcgcatatccgccgtcacggcagactcataacctttgtacagagcttctttatttttggtgccccacagttcttccacttttttcgccacctcgtccaccgacacaagccctgtcgcctgacagaatgcgccgagcataaccgtgttcgtgatcggcctgccgatcatatcaagggcgatctttgtagcgtccaccacggtgacggaagcaatgtttccgggtatatccatatcttttgggtcatgcgtcgtgttgagcacaaggataccgccctctttgacaccttcaaacacattgaccgcgttcatgatcgtagggtccagcacaataatgatatcgggatggtataccctgttttttggccggatgggttcttcgctgatcctgacaaaggcggttaccggcgctccctggcgttcaaatccgaaaaacggaatcgaattgccgtatttcccatccatcaccgctgcatacacaagtgcctctgctgctttcaccgcacccatgccgcctctgccatgtattctgatttctttcaagtcaagttacctcctatcgcttcaccatatgtcctgacggagcgtctgctacaagcattccgttttccatcacgatactgcctcccttgacagtcatcaccggccacccggtaagacgcctgccctcaaagatagaaaaatctgagcgggagtgcagatcccgtgcgtgtacttccctcgtctcgttcatatctatcaccacaaggtccgcatcgcttcccggaagcaaggtccctttctgcggatagacaccgaatgtctccgccggacgtctcgtcatatgggtaattaatgtttcaatactgattcctctgttgactgcaccttctgtcagtaccgacgccagatgcgtctccactacggagtagcccggaacgacgtcccatatggaacggtccggctgtttttccttcctgttctcgcacacattatctgttcctatcgtatcgatgacgccgtcgtcaagcgcctcccagagcgcgtttttgtcttccgcattccgaagaggcggctccatcttgtagagcgggccgtcgaactgttcacttgtcacggacagatatggactcgttgtttcgatatgtacgtatttgttaaacggtttgatctggcgcagtttttcaattccttccctcgtgccgatatgcacgagatataccggaaccctgctcttctctgcgagataagagatacgtaccgccgcctcctcttctgccatggcagggtggctttccatccagtccttcacatctgcggcctcaccgtatttttctttcgcgtcacgcagagccctcgatacgatatgcgtattttccgtatgacagcagaggatacactgcctgcccgtgcgcttcatctgctccatgacatcgaggatgaacccgtcgtccacgctcgggatcatacccggtataccattcatatatactttgaaggatgtcaccccgaagtaccgcacataatccgggagctcccgcatctgttcttcatttcctatgacgaggtgcggaatgatatccgtataggaacatcttccggcctgctcctcgatctccggaaaggtggaaaagtgggaagccgcgccgccgaagaatacgccggtcgtagtgatcccgcccataacggcagcctttgtctctgaggccatatccgtctccatcggcgcaaacaggccgagatgtacgtggggatcgatcaggccggggcagacatatttccctgacgcatccaccgtctttgccgcacggatgccctctccctggcccagggacaggatccggccgtccttgataaagacgtcggctttaaaaatgccgttgccgggcagtaccaccattccgcctttgaccgcgaggtccgcgctgccgcccgccggcggcgcctgaaatgcctgcatatcggaaagcttctggctgatctccctgaggacgtgtaacgtctcgccgcccccgtctgtttttaccggttcccggtccacagcatatgaaagggctggactggcagatgaattattctgttttaaattccggatgtaatctgcaaatatatcatttcccataagctatgttcttccttccacacctgtaattgccgcaatcgcagcatcccgtgcgcttctgacttcactttccgtcccggatatatacattcttccgaaccgtccgaccggatcaaaggtaacgaccttgatgtcggcgttcttctctgcctcattgaccgctatggatatataagccgcaggctctacttccatgataaagagcgtctcccccggtacgaggatggaaccgtgccgggaatccctgttgatgagctgtgcctgataggcgtccgtgttggagatgatctgctccgatacgatcttcggcttcatacggtccagcaccgtgagactgcatgcatccagcaccgcctcgcctgcctgtttgacatcctcgggggagtaggaatgcagctcgatctccccgtactctctctccacgatctggaacgccggctttgcattggaagacttgagcgcagcgttcagcaggtcgtagactccgcttcccggcgccagttcaatgtacagctcactcatcccggcaagcggtatgtctcctttggacacggtccctgtgacggccgcatactgaggctgcatattgtcaacaatgataaaggttctgagatttaagttttctttcttcacatcttccataagacacccgccttactgcaggaatgaatcgatctcggcatccggcctcgcgatgacatgaacgctcaccagttctccgactttctgcgctgctgccgctcccgcatccacagccgccttaacggctcctacgtcgccctcgatgatgacggtcacgagtccgccgccgatcatcttcctgccggccaacgtcacgttcgccgctttcaccattgcgtcagccgcctcaattgctgccacgagacctcttgtctctataaatccttttgatttcatatattctttcctcctatttctcaattacagtcataagtgtctacgattcccacaacgaccatatcggccggactctccgcgccgagtacggcacgtgcgccggatcctctcgtcacaagcacagtctcacctacgctgcacccgatcgtgtcaacggccacaagcatctcgcccaccggacctttcgtcttgttcagacgctgcatcgtgatcaggctgcagcctttcagatgctcatctttgatcgtggaaacacattttccctgtaccttgcagatgtacatgcgacgcacctaccttccttccagaatgtccttgatacaatccagagcgtagtctatctcttccggcttcgtgtagaaatgaggcgcgatccttattacgtcgcctctgcctgaaccgataacgtttctgtctctcaacagtttttccattgtatgtgaatctaccttgtcgccgcacacaattgcggtcgtgccgccttttttgctcacatcaaacgggctgatcgtcttaagccctctcgccgccacgccgttcagtgcatgcgcgctcagcatgtcgatcctgtccttgatcttgggcactgtgacctcgttgatgatctcaagccccgcccttgccgcataagcggtcagtacaggcggcgttcctgtgtcgaaccggctcgtcttgttggcccagtcaagatatctcgtctggaagaggaacggattcgtctggccgaaccatccggtcacggacggcttcagttcctgtatgagattcttatttacatacatgaacgccacgcccggaatgccaaacagatatttcagacatcctgacatgagaatgtcgatattcatctcttttacattcagcggctctgtcccgaggcactggtacgcgtccacgagtatgagggagcccttcctgtgggcaatgtctgcgatcgcttttatatcctgtttaaatccgttcaggtaatacacctgggttatggatgtcagaagcgtatcctcgtctatgtatctttcatattcatttatatctatttcatgattctcattgacagagacaaagtctaccttggccccatgtctctggttggcgagccatatgtaatccaccgtcggaaattccatatccgtcaccactacttttttccgcctgcctgtgtagtccagtgaattggcgacagagcttacaaggtctgacacggaagaagcaatggcgatctcatccggctcggcgcctatcagtttggcaaactctgctttcgcaagatcgatctcctccatccaggaatcccagtccatgcccacgctgccccagttgtccagatatctctgtatcccggcgagcacctgctttgactgtgcgctctgcgagcagttcccgagatgggccactgatctaaggatcgggaaatcttccctccaccggtcgatctccgcctcgctcaacagccccttataaggcagtgccttgacctgagggtaagaataggatgccgccggcgctgctgccggtgccggctgatatacaggcgcggctgccggtgccggcgcctgacggacggccgccggctgcgggatacccgcaggcgctgccgcagtttctcccgctgcaaagcgtatcccctttttctcggcctcctccctcgcaatggacgtcaccacgtcacccggattgatatatatcacctgttctcctttggaggcactaaaattaacatctgctgctgtataaaatttcttcaatcgttacaactcctttcctgctgccgtatcatgcggctgcctacgcctcctctttttcgaggaacagatcgagcaggccttcgttcggccttggaatcacgtgggcgctcacaagctccccgactctctgcgccgcctcggctcccgcatcaacagctgctttcaccgctcctacatcacctttgatggcaattgttatgtatcctccgccaatctccatctttccggccacttccacgttggccgctttcaccatcgcgtctgccgcctccacactgccaacaaatccttttgtctcaataaaaccgtatgagttcatactcaaacctccttatacattttttcgatcggccatccatcgtccggaaacaaaatccgcgtcaccggatccatggggcttgtttcttttcttatccgggggactacctgttcatatccgtccccccacgccattccatagcttaacaagtctttgaactcttcaaattcccacgccgggttgtatcccttttctctcagccgcgcatatgcgctttgaacttccgggaatttgtacaggacccaccagtacactcgtttatcctctggaatatccggatttttctccagacagaaagataagccctgttctctcatgatccgttcagcctctgcctccaaatgtttcagatcagaagggggaaacggaggactgaatgctatctttttcacctcctgggctacgcattcaccgaaagccgcgatcataccgcagataaaagaatgccggtcaatctctgccatgttttcatctcctttcctgttcaattatctgtcaattgtattaattgattcttattgacaattatagtaatcatgctataatttttctgtaaactattttacaaacagccgtaattttataatttattatttaacaaactttaatcgtcggaatattttattgtttttcgactttattacagttaaaaggagtgtgctgctgatgcccaaaaataattcttctgatctgatcgcaccttatatgtccccgtggctgagtatggatgatgaagactgggaatcgatccttaaggattccaccgtcaaaacttacgcccgggacgccgtcatttaccggcagggtgatgaaactccctatgtctatctcgtcaaagaaggccgcgtcgtgcttgacctgtatggaataaacggcaggcggcgcagcatctatatcgccgacaaaggcacctgcttcggtgaacttgcctgtctcgaccggctcgccaactactgcaccgccacaacatgtacaaagacaaccttgtatctcatccccaaaaaacgtttcatcgaagagatatacaagaacccggatttcagcatgacgctgttaaaggcgctctcactgaagactcgtctcataacaagtctattagaacagatgagttttaatgactccagttaccgtgtctaccactcactcctgagccttattcagctgtatggtgtccagacaaaggaaggttcctacaaactgaacatcaaattcacccatcaggagatggcctaccagacaggcctgtcccgtgtatcagtgtcaaacatattcctgtcacttacaaataagggcttgatagaaaaagaaaacgggtatctcattgtcaaagatataaaggcactgaaagagtacctcatcaaagaagactgggaactggaataaacatattacgatcaaaaagcacaggacggcggaaaaccgcgtataagtctgtcaccgtcttatacgcggttttccgccgtcttttccttctctctattttggccgaaaatactctgcggcttctcacattatgctctcatcatgcggaccgcttagccggttcatataattgtaaaagtagtcgacatcaagtatgtaataatagcggttgaccttctctatgacaccttcctttttcagcctgctgaaaaagcgtgataccgtcacgcggtttgaatagacgaggtccgccatctcctggtgcgtgaagggaatattgatcttgatccctctgctgcacggggaaccgctctcccggatcagatacaaaaatgcccgcacgatcctcgtatccgcagtctggaaagaaagggaagatatattccccgccagtatcctcatcttggcgcagagatcctgtatgagaaaatccttgaatcctggtatctccgctgtcatcctggaaaatatctgtcccgtcgtgcgatagagactgcagcattcttccgccgtagaagcggtaaaaagggaaggatatccgtcaaggctcgacagattcccaagcaggcttcccgggcccgctatcatgagatgcttttcacttccgttttcatcgcctgtcaaaatacgcacgacaccggtccttacgatatagacgtccggattgtcctcaccctgcgtaaataaaatcgtatttttcctgcatgtacatagttccatctttgactggatatcctccagtaaagatggcattttctttgaaaaaaatagccatggcgattcatactccggtaaaaggacgtcaaaatcggccatggtctgttgtaatgttgttattttaaccacccccattaagaaaccatcttaattataccacccatgcttatatatgccaatccaaaaaattttcttctgttttgtagtgcaggctactttcaggcagatatgcaggtggtagaatactgacaatatacaaaagcatggtgaataaacagacaatattcattcaggaggtgaaatgatgaaactaaagttaatactcccggtggcggatactcctgccacccgcaaggcgaacgaagggatcccacttgcactgcgaacactggatccggagaccgaggtgtcggtaagttttctgaaaaaaggatttgaggcgctgaacacgatcacccgcatcggctacaacagtcccggaatcgcagaagcggcggtaacggcggagaaagaaggggctgacggtatatttatcaactgtttcgcagatccggccgtggatatggcgcgggaactggtacacatacccgtcttcggcggtttccggtccgccatgatggctgccctcggatgcggcaaacgctttgccgtcatgattccgggcaaagaagacccggcaggtacgtttctgctcaacaaggtcatcgaaaataacccggaatttaaagacagtatcgtacgccgggattttacagatctggatgtgcttgagcttcacgacaaggaaaagctgcttgaacgtctggccggctttgcagaggaatctgcctgccggtatgactgtgactgtctcatactgggatgcacggccatgtcctacatcatcgatgacttaagggccgggctctgccggcgcggatgccgcatcaccgtgctggagccgctgtcgaccgggcttaagatgctggagagctttgtcacgctcggactaaacaacagcaccgcccatctcgtcaacaatgaaatggatcaactgatcaaataggaatgagatcacgaatgagtaaggaggaaatcatatggcatcattttggaaatttctcgaagaaaaagcatacgccggcggagacgatgactttgcgcgcaaaccggtacctgaagataagaaacgcggatgggcgagcagcgccgtcgtatacatcggctgcgccatcagtatatccgctttcacactcggaggcagccttgccaccggcctcacactgaacgaatctatcatcgccgttctcgtcggagccctcatcctggcggccatggcctgtctctgcgcggagcccgccatgtataccggactctcaacgagtatgataggaaagtttacattcggcctcaggggagcggccctcgtcggcctcctctatgcaggctgcgcctggggctggttcggcgtacaggccggactgttcggagatacgatcggtcagatgttccggcttatgaccggcagcgccctctctccctttgcagtaaaagtgatcattgtgatcggcggccttctgatgacgacctcagccattttcggctttaaatccattgaaaagcttagctgggtcgcgattccggccattgccatcctgatggtgtcgtcgcttgtcatggtactgaaaggccatacttacgccgacttaaacacctcgtttatcacaaatcccatgtcgcttggaaccggcatctccctcgtcataggttcgtttgccgccggagcggtgggaagtccggatatcctgcggtatgcgaagaactttaaagatacggtgaaagccatggtcatcgggcttgtcatcggttacggcatcacgatcgtgatagccgccgcctgcgccaaagcagtaggcgacgccaacatcgtcaccgtcatgatcggactcggctggggcgtccttgccatggtcgtcctcgtacttgcgcagtggacatccaatgacaataacgtatacagcggttccctcggcctctctgtcgtatttgagaagatgccgaaatacaaactcgccatatttaccggcgtctccggcactatatttgctgtgatcggcctgtccaacatgatgatcccgtttttttccgtgctcgggatctttacgcctcctctcggaggatgttatctggccgacttctatctgtgcaggaaattctacagctttgaccggctgaataagctgaaaaaggtgcgcatcgagagtatggccgcctatctcatcgcagctgccataggctttatgacaacacagacatccccgggattcgcgctgtttgagatcaccaccattccagcgatcgactctttcgtggccgcatttatcatgcagatcgtctgtgtgaagctgtttaataaaaatcacggaaaagattgttagatcatctgtatataaggaggacttgatatgtcagtaaaaatgaacagagaacaattatatgatatgacgagcggagcgatcattctcggcagcggtggaggcggggacgttaaaacgagctaccgtctgcttgaagacatcctcgcgctcaccaaagaagtagaatttgccggactggacgaagtgccggacgacgcgaatgtagccatcatatccggcatgggttcccccgcagccacaaaggaacggggattcgactgtatcgcgtgcgtccacgcgctgaaacggctggaggccgtgaccggcaggaagatcgactatgtagccgcctttgaagtaggcggaggcaattttatgcctcccgtatacacggcatgttacaccgggatcaaagtcatcaatgccgacggtgtgggacgcgcggtccctgagtcattcatgatcatgccggaaatacataagatccgctccgccccttttgcaatggcgaatgaagagaacctgagcgctgttctctactatgaggacagcagtgactgtgagctgatcggacgtcctatcgtaaacgtattcggcggctccgccggcgtagccaactatatcatggacggagctgccgccaaaaaagcgcttgtggcaggctcgtatgaactggcccgctccatcggagaagccgtgcgcctcgggatcgccgcgggcgggcgcccggtggaatgtatcgcccgggccaccggaggtatcgagatcatcgagggaaaacttaccgaactcaatatgaaaacggaaaacagccacgactggggttacgagatcatagaaggaacgggcagctatacagggaaaagcattaagatcatgatagaaaatgaaaatatccttgcctttgaccaggacggcggcgtgcgctgcgtaacacccgacgcgctctgtgtcttccggtcagacggaacgccgcttactaacgcggatctggagcccggcatggatgtcgccttcgtaggcgtgccgtgcaacccgaagtggctggaaggagacgctgtatctgtcttccagaaagcattcgatcatttcggttataaaggcggatacatacctgtgactgaactgaatgcacatagatagagagggatcacaatggaatatgtgttagacaaactgatcgagaaataccgggaagatattgtccgctgcaccaggaatctcgtccgcattccaagcgtcaaggatacgcccctgccgcagatgccgttcgggcgtcccatcggggagtgtctcgacgaaacgctggcgctctgccgctctctcgggatgcgcacgaaaaactgcggaggttatgcaggatgggccgagaccggcagcggagaagaactgtgcggcgtccttgtacatctggatgtcgtaccggcgggggacggatggacacacccgccctttggcggactcatggaagacgggaagatctatggacgggggacggttgatgacaaaggccccgccgccgcttctatctttgcactgaaagcgatcatggagagctctcttacgctctcctcaaggatacggatcatcttcggcacagatgaagaaaatgactgggcctgtatggaccactataaagagcaggaagaaatcccgtccgccgggttctccccggatgcagaattcccggtcatttacgccgaaaaaggaatcctgttcgccacacttacaaaagaaggaacgctcccggaaggtataccgtatatacgaagcctttccggcggccgcagggcgaatatggtgccggatgaatgccgggcggagatcgttctgccagagccggacgcagcctttgtccgtcagctcaaagctgccgcggactccgccggggaagcggaaatcaccgtcagcggctctctgatcacggtaagaacagcggggaaaactgcgcacggaagtacgcccgaaaacggggtgaacgcaatatccgtcatgatgaatgtgctcgctcctgtcatgacagaaaattcttttcagaaggatttcctggatttttatatgtcacatatcggcagtgagaccgacggctgcagtatgttcggcagcctgagcgatgaaccgtccggaaagcttgtgttaaacgccggagtcctcaccatggatacacactctgcggcacttaagctgaacatccgctatccggtcacttacaccggtacacatatctggcagcggcttaccaaagctgccgcagacgcgggccttcgggccgtcatcgacctgaacagcgaaccgttatacgcggacgcggacagtcatatcgttcagacgcttctgtccgtctatcacagctactgtcccgacggctctgtccccattgctgtcggcggcggcacatacgccaggagcatgccgaattccgtggcgttcggtcctgtctttcccgggaaagccgagctggcacactgcccggacgaatacatatcagtggaagatctgattctttccgcaaaaatctatgccggggcgatgtaccgcctggcaggcaggaaggaggatgtcttatgatccaggacagtatcacaaagtatattgacaacagccgaagcgatatgatcctgcttctggaaaagctggtcaacaccgacagcggctcatacacgacagccggagtagagaaggtagccggattcatctccgagatcctcataccgctcaaatttgatgtgcagatgctgccgggcggaaaatacgctccgcatctgcttgcctgcagaaagggaaacgggacgaaaaaaataatgttccttggccatatggacactgtttttgacgagggtactgcacgaaaacggccgttttgcataaaaggtgacagagcctacgggccgggcgtatgcgatatgcaggcgggaatcgtctgtctgctctacgcgttaaaagcgctcgaagaagccgggtttaccgattacggtgaattgaaaatactgttcaacagtgatgaggaacgcggcagtgagacttccgagaaatatattatcgaagaatgcaaaaaaagcgatatggtgcttgtcatggaaccgggtatgccggatgatcacgttgtgatcgaacggcagggtggcggcatcttcaacctggatatagagggtaagcccgcacatgcaggggcatgtccgctcgacgggatccacgccatcgatgaggcggcacataagatcctggcattccacggtctgaccgacttaagcctcggcagatccgtcagcgtcggcgtcataaacggcggcacgagaagcaacatcattcccgagcatgtctttatggagatcgacctccgcgccagatcacaccaggacggcctggaacttatggaaaagatgcagaagatcgcagatacctcttatgtacccggcacaaaaagcacactgaaaaaggtgatgtaccggccgccgatcgaaaagacgccgggcaacgcagctctttaccgtacgctcactgccgccgcccggaagcttggcattacggtaagtgaaacatactgcggcggcggcagcgacggcaactatacttcagccgaaggaattcctaccattgactctctcggtcctgtcggaagcctggaacatacagacggtgaatacatgctcatcgagactttattttcaagatgcaaactgaccgcgctatttattgcagagctttccgcctgatctgaccccccggcatttatgtataaaaaagtgctgccgcacttacgattatttgatcgcagatgcggcagctctttttttctagcatccacacttgaatgtagcacattcagtctggtcgcacttacaggcattgctgccttccacactgatcttacccgcgtggcatttgcattcttcgttatacatacagtctgttgccttgcagtcgatacagctgcaggctgatgcgttgttctggctgacattgctgtaagagtcgcctttacgctcttcgaagctgtcgcagcaagtctcctccgcacgctttgctgtgtttcctcctacctggatcttttcaagatcgcagtaaaagttcttattgtgtgtacaggtctgtacggtacattttaattctggcatgatcctacctccttagtttgatatcagaagtagtatctgcattttaagaacataatattcttttttcattttattgtttatttttatgatcgcacagtcctttggcaaacatatcgtggaactccaggcagcactgctttaaagagaccggcttgcctgactcattgatgaagcagtgcctggtaagcccgcggcagtggaccatctccgtcttttcgtccaccacctcatacacgatcgtcatcttgataccgttatattccttaatatacgcatttatggccactgtatccccgaaatgtaccatgcgcaggtaatctgcctccaccgaaaggaccggactcatgatcccccgcttttccatctcttcataacccattcccatctgtgccatcagatccgttctggcttcttcaaaccagcggatataattggaatggtgtacgatccccatctggtctgtctcataatactgtactttatgtctgtatggttctgctgtattcattttatccaccttccgttcacagtctatggctgccgccgtcctcagccttcttcctcatttccctgatctctctcacgaccttcccgtcgatcccgcgcacggtcacgtccggcctggcgacgtagaacccctggagataatcgatcccaagtgatatgagcgtctccatctccgcggccgtctccacgccctcagcgatcacctttattcctctcggtctcgcgtaattcagcgtgctcaccgccagcgcctgcctgtctttatccttgtggatgtctctaacgatactcatatcgatcttgacatagtcaggctgcatatagagcagcgtcgactctgagctgtaacccgcgccaaaatcatctaccgcaagctctgcctggaattccttcagcatctggatcttatcttccatgataccgatgtctgtctgctcgctttctatcatttccacgacgagcataccggctcctatctgataacgctcgaacagaccgtacatcaattcctctgaaagaatctggttcggtatcgagttgatgaaaagctttctgtcaccgaatgcgtccctctgtgacgcgtaatcctccagcgctctgcggaacgtaagcttctcgatgtccggaagcctcgactgggcgatcgcaagccgcatgacatccgccggagatgacagattctccatcatagggcgcatgagcgcctcatatgcgaatatagaaccgtcgatcgtgcttacgatcggctggaacgcatagttgaccatctcatcctcgatcagtttgttgagctgctccctgccctgcagaagaaatgcatccttctcatatgcttttttatcaaactccttaaattctcctttgtagctgttcttcgtgtcatacatggcgaaatccgcgtattttctcagctcatccagacttctgccgtcatccggataccacgcgatgccgccggaagcgcgcacggcgatagactctccgtcgggcatgacaactcttgtattgttcagctgccgcttgatctcttctactttttccagaagacgttccctgctaccgcattccgggacaaaggccagaaactcatcccccgagatacgcccgacgatacctccgtctctggacagacctccgaagacaattgcagccctctgaatatactggtccccatagtcatggccgtacgtatcgttgacatatttcaggttgtcaaggtcccacatgatcattgcgcccagcgtcaggcggctgccttcctgcagcacctgcttcatacgccggttaaatgccctccggttcagaagatgcgtcagaatatcgtaatctctctcgtactctatcttctgcctctcatagatatctttcgtgatatccagaaccgtgatgagcgtcttgtcctcgtccgcaagtgacttcagatgcacccatctctgctggatcgtatgggcgatctggtaatccttttcccctgatctctcaagcagaacgtcaagccccgcctcactcaggtaatcctcaaagtatttccggtccagatatccccggctgtaatattttttatccatcatgaacatcttgatgacttttttcgtacagaacactttttccgcatctctttgatattccacaacaccgagcggcaggttcaccagttcgatgatctgtgacactttcgacgcgttctgtctgacattggcattgagcgaggcgatggcattttccagcgcgacgatctcccgcacattggacgacttaaatttcaactcttcgttgacgtccttgctccgtatctcatccaccatctgctcgatcggccgggtgaagaagtaactgccgaccacagcgccggcaacgccgagcagaatggaagccgcaaatgctaccatcaccgtcatatggagccggtctgtcgaacggaacagcgtactgtcaggaagcacgcctatgaccgcccacttctccctgctgaaaggcgaggtcctcctgtacatatcaatattctgcacattgccgtaattcccctctgcatcttccagctgatacactttgccgttagccggttcatttttaaacgtgatcttgttatcatccgccgccagctcctttgcgacaatgccggtggagaatattgactcatacgatttcccgtccgtcgtcctcgcaagtacaaacgaaccggtattcccggcatccagttcctggggagacagcatcgattccagataatcctcggacacggtaattcccatgactccgtagaccgtcccgtccttaacaagcggtacagaataggacatcactttgatatcctccggtgaccaccggaagaaaccggaccagtacccgagctctgaacctgatttatccgtgtacttttcacctgccgcagccggcttgtcgtaccatgtacggtccgccatatcacggaagacaaaacgggaagaccaatatgaatccattggaatcccgtatttttttgatatctcggaggagccggtctccagcagaaatcccttggaattggcgttggtcccctgatccagattacggatgagcagaccgcagtgttcctgtgcgtcccggtctccatatccgcccagcactatgtatacctccgtggtggaattgtaacggagcatatcgatcatatcctccgtcacatccagcagcaggccgttattcaattctttatccaacgcaagatccgagaggtcttttccttcttcagccagtttcgcgctgaccgcggcctgtactttctcctgatactcttccagattcgaccatttattgaacataaggttctcgatcgcattttttctggcgagcgttgtattggaaaagcttgtgcagacactctttttcagatattcaaaaccaccgttaaatgttagcgctgaaaagcagagtatcccctgcagcatgaccacgagcagcataacggcaagcagttttttccggatcgaaattctttttatattcatcattacgacttcctaactttgaacagcttccctcaactgtgtactcagttcattataccacgtctcaaagttctcttctgtcaccaatcccgagacagcttcctcaagtgtctttcctgtctccatcagcccttttgccgtctcccggtctgccgccgccttgttctgcagggaatcttcgacaatatgacggcaattgtcacttcccttaaacggagtcatcgtatataactcatatgtattgcactcttcaaagcccacttctatcgtatcccggacgatatcattccattcaatcttatttttctcaacgatcttttccagagattccatatcattggagctttttttgaccggcagataagacgaggccatactgaacctgctgtttgcatccacatctgtaaaccatttcaggaattcggccgcggccgcctctttctccttatctgtctttacaactgccatgcccgccccctgctgtgtcaccaccgggtctgtcccttcaaaattaggcaccggcatgaccatcgtctcgatcggatacggatcatcatctcccacggtgacctcctgcgcataataagaaccgccggaagaggaaccgatggcgacaatgagatcgcccgtcttcatgtcatcagagcggtatcttcctatactggtaaaatatcctttgacatacggaacataatagttatcccaaagctttttcatcacatccttgtccatgctgatgctgacatccgtgtcttttatatcaaacatgtcttctccgagctgatgcgcgcctgcaagcatatagttggcaaatgcatcccgcccgaaaagtgcttttcccccggaccattcaaaatatgcctccgccgtatctgtcaggccttcccacgtcgaaagctgtcttaagtctgcgccggtatccaccgcaaacttatcccagtccgtcttgttgatcgtcatcacttccgttgatttcgctatcggaaagacgacgagggcgttatcctttcccactcttccttcctcgatatactcgtctacatattcactcagttcatcctttgtaaagtaatcatccagatcagccagaagaccttcctcctcaaattccagagcatttgacccataacagctgaagatatccggcagatctctgtccttcgcgtctttctccagctcatcgttcagattctggaaaagctcgctcatatctccgctgctgctcgccttgacgaatattcccttttcgtctccgactgtgttgttgaactcttccaccagctcatcgagcgcgatcttggccgccccgttgtagtacgtctctatctctatcacagtaggattgtccgaatccgtacccccgccggtctttccggcgcagcctgccgccaggcccgtcgccagagctatgatacatgcacaagcaattcttcttttcatggttttcctccctgaccaaatttatttcaaaaaatagaaaaaaatagcaatatactataatatagcatattactattgttaaatcaaaagtttatattgtgcggaactgtttatgtacaataaatactcatatctgctgccggtgtcagcatggcagccacaatctgcacacagcaaagaattcccgcaccatataatttgcaaacagcagcggactgcagtctgacggaatgcggcacacatttttatacccggttcttccggcataacagcacgcgcggtacatgtgaaaattgttggatacgatccccaccttcacagtcatgtccggcagatacgcagccgaaaacctgagattttcctctgtagactttgatcggtcctccagcagtatcctgcttcttttgataccgcagtctgccagaaaatcggccatcgcctccgcctccgctatgtcttctcccggaccctgccctccggaaacgatcaccttagtgcccggattttcagataaatacgcggccgaacgcttaagcctccttctgagagaatccgtgatcttcgtcccctttacctgtgcgccgagtacaatgaggtacggtatgtctttttcttccgtggaaaccattcccgccgcaatgcgtatttcaacagcagcaaacactgccgccggaatccagagcagtttccacagcgggcttccggccagttccgggcgaagctgaaacagctcccagagcgccccgcaggcaagccctgccgccagccagaatcttgcgaaagtagagttccaccggcgcagacgtatgctgactgccccgtagtatgacaggcagacagctcctgccgctggcagcgctatcttccacagcatttcttatatttcttgccggaaccgcacggacatgggtcattgcgtcccggttctttctctttcctgaccgtaccggactgtttctgttccttgtacagagctttcagctcatcctctgtatatatatccttccactgcggcagctcatataaccagtcagctttggccgccaccatattcttataaagcttttctttatcaaatgcaaggcttaccaccgtatcctcttccatcgtatcgataggattgggttccttcagactgtcgttgataccgtcgaggaagccggccattgtaaagacttcctggccatacttttcggcgagctccttaaccgttccctttacttctacatcaggctgctcaagaagctgttcatatatttccttctcgatctggaaatacgctgcccagaacttctgcagttctcctctgtccgcctgctcattataggctgtatctctccactgttctaataatgtacgactcatattacatactccttctgtattcatttgcaattttatcttgctctttatataatatactaaagacttgattagatgtaaaggatgattctgatgaaaaagctgaaacgtatcacagcgctggccggcgcggtactgcttgccggcatgtacatgagcacgcttatattcgcccttctggaccgctcggagacaatgggccttttaaaggcatctgttgtgtgcacggtcctgctgccagttcttctgtacgcctataccctcgtatacaagatcacgaaaggtgacggcggcggtgaagacgggccttcttaatatcacacataaagctgtgccagcatccacgcagagcgttctttttctgcgccctttttccgtcccttttgttctttttcccttattttttgtctcttggtaaggtattcttccattgatatcacttctgggtaatttgactcatttctctgctgcatagtagatacctccatttccattattcatactctcgggacgcaaagtcccgactcccggctttattattatattgttacttcccccgtaatatgcctgttttatgagcacggattcattataatcaaaaaatgtgtctacactgtggcaggaatcttaaaatttgctgaagcagtctgaaccaaaagaaaagacggatgtgctaagacacccgcctttcttctcttttataaaacatcagccgcccgattcgtatatatgatatcctctctgccaggtccgtttgagaccatagtgatcggataaccaatctgtccttcaataaattctatatatctgcggcagttttccggaagcttgtcatattccttaatgccgcggatatcgcagttccatccaggaagcgtctcaaggacaggcttcgctttctcaagcagatgcgttgtcgggaaatctgtcgtcactttcccgtcgatctcatagccgacgcataccgggatctctttaagataaccgagcacatccagcactgtaaatgccacatcagtcgttccctgcattctgcatccgtatttggaagcgacgcagtcaaaccatcccatacgtctcggtcttcctgtcgtggccccgaattctccgccgtctccgccgcgccgtctcagctcgtccgcctcttccccgaagatctcactcacaaacgcacctgcgcctaccgcgctggaatacgccttgcacactgtgatgacttttttgatctcatacggagggataccggctccgatcgccccgtaggcggccagtgtggaggaagatgtcaccatcggatagattccgtggtccgggtcttttaaggagccgagctgtccttccagcaatatctcttttccttcttttaccgcattgtgcaggaataaagacacatcgcatacgtatggctctaccatctttttatattcttgtaactcatcatatagttcatcaggatcgatttccggtttatgatacaggtgtttcagcagcacatttttaagctctgcgatgcgcacagtcttctctttcagcagttcatcatcaaacagttcgctcacctggaagcctaccttggcatatttgtcggaataaaacggagcaatgcccgacttggtggaaccgaatgactttccgcccagcctctcctcttcatatgcgtcaaaattcttgtggtaagacatgacgatctgcgccctgtcagacacaagtatcttcggcgcgggaactcccttttctatgacagactgtatctcactgaacagaaccggtatatcgagagcgactccattgccgatcacactcgtcgtgtggtcataaaacacgcctgacggcaatgtatgaagcgcaaattttccataattatttataatcgtatgccccgcattggctccgccctggaatctcacgatgatgtccgcctcctcggcgagcatgtcggtgatcttaccttttccttcgtcaccccagttggcacctactactgctttaaccatatcaattcctcctgtgttatcaacataactttgcctatagcattatactatattttaccgttcatgtaaaatgctatttccaaaaactactctatgatatcttcccccatctcatacagcagctcattcatttctccgacggagacgtgcttgtccaggccgaacaatatgatactgtctctcttgttccttacatatagaacaggtgattccgacactttcagcaccttctgcatctcatcgacagacaggctcatgccgaaccccagtgcgagcagcttgtctcttgccggcttgcgcattcctgaaaatatctggtacgcatagttgcggtcaagctgtgatctccggatcacttccgccttcttaagccctttctgcgcaagcatctgctccagataagcgggcaggtcgccgtcgataaactccggcatctccctgagatactctttaaagcttctcttcttctttaagatctccagcaattcttctgtcgatttattctcttccatcatttcatcctcccgtcacaaagcacattgaacatcagcggttcaatattgtcggcttattgaactactaatgttcaataagttatgataaaatgaatatcaggaaaaatcaaggacaaaggataagaaactcatggaaaatttaaaagacagctatctggattacaattactctgtgctggctcctctccaggacaaagaaccttgtacgacttttctcgtaagaagctcgaacagcggaactctcgccgtcagaaaacaggtgtctgcggctcagtttcccgtctatcagaagatgacgatattagatcacccgaatctggcccgggttcttgatctctatacggcaaatggggcctgttatgtcattgaggagtacataagcggtgaaactctggcacagaagctggaacgcgcagagcatatagaagaacgtcaagtgcttgactacatggagcagctgtgcagtgtactgtcttatctgcattcacataagatcatacacagagatatcacgccgggaaatatccttatctccacggattcggtactgaaactgatcgactttgacatatccagaaccaaaaaggaagatcggaaccaggatacgaccatactcggaaccgccggttacgctgccccggaacagtttggcttcggacagacagatgagcgcacggatatctatgcggccggcgtcctgctgaatgtgctgctgacaggcgcgcttccctcacaggggctgccccgggaagtgttctaccgtaatatcgttgaacggtgtacggccattgaccctgcggtccgttatccgtccgccgagatacttgccggcgtgcttgacaggcgccatccctccaatgatattccattcctgtcaagggatgccgttccttcttccggatggatccgtttcttccccggtttccgtacgaagaaaccatggaaaatgactgttgctgtatttgggtatatgatcctcatatatataggatatcgttccgccaccgctcccctgagcagcggcaacacaagattcgacatctggctgttatctgtctggtttatgtatgtaccatgggcaatactgacagactgggggtattatacaaaatacttttccttcttccgcaatctgtccgacgccaaaataaccgcggtgaaggcaggacttttattcctttctttctctgcatatgttttctttatgctgcttcggcttttattctttccgtaaataatcaatgtatgctccatgcataccaataaaaaaaagaacttctgtatattgatatcagaagttctttttggttattcatccatataattcaataacaattttgtcagattcaccaccatctctttttctctcggtgtcgcgcctgacaaaagattcgtccagaggtcccggtaggatgactgttcctggcttatggattcctgaagaagataatcgaccgtaacaccaagacaattcgtgatatttataaggctgtccagtgtcagcttccgctcccctctctctatctggccgatataagaggtggaaaggttcacttcctccgccagccgttcctgagtcatattcagtttttgacgttcttcttttattcttcttccgagtgctgtgtaatccatatgatatacctcacatcttgttactgcaattttacaatgattattttacagttgtaatatgccgactgcattttattagtatgctgttagcattatttcaattgataaaatatatacatgctgaactgacaaagttctgcatggcacaaactaaacgattatacttacatgaggaggggagattatgaatccggacaaaagacagcaaaagccaaaaggcgcactttccaccgtacggctcgttacaggcattatatctatcgtgctctttgcgctcgtatcgcttcagtcctgtgccgcagggcttagcaacgccctggaagaaaacaatgcgtcaagcggaactgcaggactgctgctggccttcatttttttgatcgccgggatcacaggtgtcgcaacgcgcaactttgcaggcgcaggagcgccggccgtctgctgcgtgttctattttatcggcgcggcgctgaccatagggtcaggcagcaccttcggcgacctgcccatatggggcttcatcgcctgtgcattcggcattatatatgttgttgctgctgtgaaaacaaaaaagaataataattaaagagaggtactgtttatgaaaaagaaattgtttgcaacactgctcatcctttccatgtgtctcggactggctgcgtgcggaagttcttccgccggatctgacagttccagatcagacaaaaaaacggagaaatcttcagatgacaaaaagaaagataagaaaggagagccgaaggaatacggcgtcggcgatacatggactgtcgacggcaagttcagcttcaccttcacttccgcagctcttacggacgacagaaatgagtttgatgattccgcccctgcccaggtcgttctgctcacatatgactatgaaaatgttgggtttgaaggacttatggatctatatttcggcgactccgactttaaggtcatcgacgagggcggcgtagtggcctcaagctatccgctggctatctccaactacccgcaggaaacgcctgtcggcgctaaatgtacaggagcgcagaccgcctacgggctcaaaacggaaagttccgccatcacgataaccgtcagccagatcgacaatgaattcaacgaagaaaaagcaacctttaagcttgcacttcaataaaaatccacggcctggagcatatctgctccaggccgcgtcagttcgtctccggatatctacatgagcggcgcgaacagccgcagcacctgtcccatgatctttgtcagcatcgtccttttcttcacttccatcagcgtcactttatgacatttggcgagcgtcctctggaagtcccgttcgatcttgtccacttccgaattattgtaaatgaacaccccgcattcaaagtgaagatacaggctcctgtaatccaggtttatcgtgcctacagtcgcggtatcgtcatccgatacgaatatcttggcatggacaaatcccggcgtgtattcaaatatctgtacgccgccctcaatgagttctttatagtatgttttggcaacggcaaacgcataccacttgtccggtatatggggcatgatgatggcgacctcgatcccgcttttcgccgcgcgggtcagcgttgttatcatctcattgtcaagaataagatacggagtcataatatgcacatacttcttcgcgtgattcagtatatggaaatacacctcttcccccacattctcatcgtcaaacggactgtccccgtacgggatgatatatccgagttctctgcgcaggcccggcgtcttctccgtcagatacttgccgtagccctccgcccgtctttcatccacattccacatctgcaggaacatcatcgtaagactttgaaccgcgtcgcccttcagcatgacggctgtatccttccagtggccgaatctcaccttctcattgatatattcatccgcaagattcacacctcccgtgaatccgactttgccgtcgatcacgcagatctttctgtggtcacggttattctgtactgtggagagaaacggctttaccggactcaccatcttgcatttgatgccgtatctgcgtatctgttccgggtaattatacgggagcatggatatggcgcacataccgtcgtacatgaaccgcacttccaccccttccctcaccttctctttcagaatgtcgaggatcgtattccacatccgtccttcttccacgataaaatattcgagaaaaataaacttccgcgctttcttcagttctccggtcattgcccggaacttgtcctcaccgagcgggaaatattccacctctgtattccggtaagtaggaaatccaagctggttggacagataataggcaagctgcgcgttggccgaacggctcgcccatatggcgtccacgatattctggtcctgctccatatacgggtctgtctccagcttcagatgtgccagccggtgcttcatatagcgtgtgccgaactgtgtcttcgcaaacagataaaacagcgtaccgatgacaggcagcgcaagtacacagagcatccacgtcatcttaaaagccggattcccttctgaattgatgatgtatataaggacgatgatgcccagtatcgtaaaagcaccgtatatatatgccatatattctgtcagatatatagttgttcctataaaaataccgatctgaagcagaagcagcagcagaataattccggttctgctgaaaattatcctgaacagcccttttttagctgttccgcgggcttcattgtgcataaatgtgtaacttcctttcttttcttgctatctgtacagtttaacatactttttttctgtccacaatacagataaaggcaccctttttaccaaaaaagaagccttttcccttttctttttcagcaaaaagtattacaataaggattagtacatgaatgtaaaattcaggaaggagttatgattatgtccaagtggggtaaaagattactggggcttgcagcgatcggaagcgcggttgcaggacttgtctattattttaagaagaaaaatatgtgcgatgaggaagatgaatttgaagatgatttcgaggatgaagattttgacctcgacaatgatctgaaatcagcggcagaccgggaatatgtaccgctgaacccgtcaggcaaagcggaggaagacaccggcgctgacactgcttctgatcctgcaccggaagataaataagactaagaaactatatgtggcaggctccgttcccggacgcctgccattttaaacactgtttatctccagcagtccgcaagaatacggactgcttcttttatctgctcttccgtcagattcgcatagccgagcagtacagtacggcttgtctccttcgtaccttgtatcatatagtccgaaaggccgtacacacggatatctctctttgccgccctctcgatcaattctctctccataaggccgttcctgaatgtcagaagcagatgtacgcccgcatgctccccggatatgctgcagatgtcaagtagcggtctcagttcttcaatgagcacgtcgtgccggctcttatagagcgccctcgtcttgttcagatgccgctcataatacccctcttcgataaacctctggacgataagctgatctaccttggaaacggttgaattgacaaaacggctcttcttattgtacgcatcaagaagcggctccggaagcaccatatagctcagacggatggcaggcgcgatcgacttggagaacgtgccgagataaatgacctttccgtcagcgtcataccccttaagcgccgggatcggcttgcccttataccggaattcactgtcataatcatcctcgataatatagcggtcttcccgctcctgcgcccatttgagaagttcaagcctgcgtccgatcggcatgacggtcccggtcggatactggtgggacggagtcacataagcgacgtcagcctccgcaccggccagctgtgagatgcacatcccgctccggtccatccccaccgagactgtctcataggacaggctcttaaaaagacggtatgcctgcatataggcagggtcctcaaaggcgaccttaagtcccgggccaagcaccgtactgagcagcatcagaatataatcattccccgcccccacgataacctgttccggcgtacagttcacgccgcgcgcctgatagagataactgcatatggcgcttcggaaactgtattctccctgggagtcgccggaacggaacagctctgtcctgtcgtccgtcaggatctccctcgaaagcttcctccacacattatacggaaagctcttcagatctactccgttcggcgtaaaatcataccggtagctccgctgttctgccctgcgtctcccggtctgcggctctgccctcttgagatagtacagttcctcgatctcggacacgaagaatcccctgcacggcctcgattctatatacccctctgaaagaagctgctcatacgccagctctaccgtactcctgctcacctccagatagccggacagcgaccgggtggagggaagtttctctccgtaaggtatacgccctgactggatgtcattcttaatataatcgtagatctgctcatagagcggcgttgcggaattcgtcttaagattgatcgtcagctcattcatggccgtctacttcggcagcctgaaggagctcttaagagatacgatcctgttgaacacaagctgccccggcgcagagtccttcgagtcgatacagaagtatccgttgcgtacaaactggaagctgtcacagcccttcgcactgtcaaagctgtcctccacatagcagttttccagcacctccagcgaattcggattcaggttaagggagccgtcctccttattgtacacacctttttcttcatccacgagattctcatacagccgcacctgggccggttttgcgtacggcgccgcaacccagtggatcgttccttttactttgcgcccggtgaagccggtgccgcatttcgtctccggatcatacgtacagtgaacgaccgtcacattaccgtcttcgtccgtctcaaagctctggcaggtgacaaaataggcgtgcatgagccgcacttcattgcccgggaacagacggaaatacttcttcggaggttctatcataaagtcgtcccgctcaatgtaaagctcacggcagaacggtactttgcgcgtcccaagctcagggttttccatattgttgtccacttccagatattctacttctccttccggatagttgtcgatcacaagcttgatcggatgaagcaccgccatcatgcgcggcctcttaagcttcagatcttcccggatacagtgttccagcatcgcatagtccaccgagctctggctcttggatactccgcacatctccacaaacatccggatagactccggcgtaaatcctcttcttctgagcgcagcgatggagacgagcctcgggtcgtcccagccgtccacgacgccgtcctgtacaagctttttgatatagcgttttcctgtcaccacattagtcagatacagcttggcaaactcgatctggcgcggcgcgggatcaaactcacactcttttaccacccagtcgtacagcggcctgtggtcctcaaactccagggtacagatagaatgcgtgatcttctccaccgcatcctcgatcggatgggcaaagtcgtacatcggatagatacaccatttatccccggtattgtgatgtgacatacgggcgacacggtagatgaccggatcacgcatgttaatattgggggaggccatatctatctttgcccggagcactttctctccgtccttatactccccgttcttcatggcctcaaacagtgcaaggttctcctccaccgtgcggccgcggtaaggactgttctttcccggttccgtcaaagttcccctgtactctctgatctcttccgcactcaagtcacagacgtacgcttttcccttttttataagcttgagcgcacactcgtacatgacgtcaaagtaatcggacgcaaaatacaggtgttccttccagtccgcgccgagccattttacatcctctttgatagactccacgtactctgtgtcttctttcgtcgggtttgtatcgtcaaacctgagatggaacgtgccgtcatacttctgtgacagcccataattcaaaagaatggatttggcatgtccgatatggagatatccgttcggctccggcggaaatctcgtgcagacctccgtatataccccctccgccaggtctctatctatctcctgttcaataaaatttctggaaattgtctcttctcccatttatagtcctccttatggattctgtagcgtttatgttccttatcttatcataaaataataggcagaacaaggtcgatcatacacgttttttcagggtcggaagcgcctttatgatgatagcggcatggtggcgtctttcttcctccttccgggcatccagtttcctttccaggcgtacagcagaatgagcacagcccccacaagccatgacaccgggtatgccgtcatgacccagtcaagcttatgttctatggcaagcgcgccccatatccaggcaacacgcaggatacagagagaaaagagaaagacgagcatcgtctccagcgtcttcccggcgccccgtatcgtccctgaaagcacctgcagtatgccgagcagccagtaaaacggacagaagaacctcataatatagaccccgtagcccaccacatccggattcttggtaaatacgccgatcacctgcggcgcaaaggtaagcagaagtatgccggtcaaaatcgtgtagacgacgcccatgccgactgagacgtacatcccctttttcaccctgtcatacttgcccgcccccacattctgccctgtgaatgtcgccgccgccattccaaagcttaagacaggaagtatgttaaatccgtctatcttgatatatgcggcaaagcccgccatcgcgacagctccgaagctgttgacactcgactgcacgatcacattggagaaagatatcacgatattctgtattcccgtcggcagcccgatacggatgatcttggacaggagattatcataaaaacggatctcctttatatttacatgatacacctctttactttttacaagatataatataatgaagacacacgacaggagctggcttatgtctgtggcaagcgcggccccgacgatccccattttcagtacgatgacaaacagaatatcgagtacgatattggaaaatgccgcgatcatcagatatacaagagaccgccgggagttgccgaccgcattcaggatgccggcagacatattgtaaataacagaaaatacaatgcctccgaaatacacctgcaggtagacgactgcctccctgaatacttccgccggcgttcccatcgccctcaaaatgaccggcgcaagcgcgatgccggccacagtcagtatgaccccggccgcgatggaaatggcgacggtcgtgtggactgccttttttaagccgttcttatctccggccccgtaaaactgcgatatcacaacaccggccccggccgatgcgccgatgcagaacccgatcagcagattgatgatagaagaactggagccgactgctgccagcgcctcgcttccgatataatttcccacgatgatcgagtccaccgtgttgtacagctgctgaaacagattcccgaggatcagcggaatggagaaaaacagaatctccttccagatgaccccttccgtcataactgttgattttttcatttgacataccctctctcacattacgaaaaaaaatactccctgaaagggagtaatcaagctgcctagcggacttgaaccgccgacctccgccttaccaaggcgacgctctaccgactgagccaaggcagcacatgcatgcgatatgcaacgttaataatatacaatatcacatgaccgtttgtcaatatctttcacctattttctgccctctttcgcgagaatcttttccgtcttgctcttaatgcgctgcagcgcattgtccacggtcttcgggcttttgtcgataagcttggcgatcgtgcggtaatctgtccccatcagatgcagatagagcaccctgctctccagatcgctcagctgttcctccagctcgctctccagcagggatacatactccttgctcaaaaacagttcttccggattgctctcgcccccggcctccatcgtctccagcagagaacccttctcatcctcctggtcgtaaagcgatatataggagttcagcgggctgtgcttctttctgcgggaagcctcgatggcagagtacatctgccgggtgatgcacagcctggcaaagctgaaaaacgacgcctgctgctccacgtcatagtcctccaccgctttgaacaggccgatcatgccctcctggatgagatcgtcgttctccccgcccagcagatacatggcattggcctctttccgcacgagattcttatacttgtccataatgtaatcgacgatcgccttgtccccggctctcaaattacggatcaactgttcgtctgtcattgtctcatagtcagacataactgcacctctctacttctgaatgcgctgccgtacgatctcataggcgagcactcctgcagccaccgatgcattgagagaatctatattccccttcatcgggattcctgctgcaaaatcacacgtttcctttacaagacgtccgactccctcgccctcatttcctatcactagccctatcggccctgtaaggttcagacggtacatggactctccgtccatatccgcacagacaaaccagagtcccttttccttcagttcttccatcgtctttacgaggtttgtcaccttcgccacgggtgtgtaattcagcgctccggccgacgttctggccaccgtggccgtaagccccgacgcccttcgcttcggaatgatcaccccgtgggcgcccgcaagattggcggtacggatgatcgcgccaaggttatgtggatcttcgatgttgtcgagcaggaagataaacgggtcttcgccccgttcttccgccagggcaagcatatcatctaccccggcatattcataggccgcgccgtatgcgataacgccctggtgcctgccggtctccgacatctgcgaaagccgttcctttgtcacaaagttcagcaccgtatcgtgctttttggcctctcttacgatcgtgcgcaccggaccgtcctgacaaccgtccagcacgaacagcttatcgatcggcttgcctgagcggaatgcctccagtaccgcattgcgcccttcgatcatcaattcactttccttcatctcactcattcattttctccttttatactgtccagtcccagcttgaccagatcaagcatccgcttatagtcccgcctgagatacagatatcccatgagcgcctcaaagccggtggcccgcctgtaatctgtcagcgactggtttttggcaggtgacacactctttgcgttcctgcctcttcggtagacagcgtgttcctcctcggtcagctgcccctgcagcgtccgcatcatctgcgactgggcggaagcctgcacaaaggcgcttgtctccttatgaagcttgttcacctgcctgttgccctcattgaccacgagactcttgatcatcagatcataaatactgtcccctatatacgccaaagtaagaggtgaatactctttcatatccacctctttcatctgaaaaatctcgcgcatatacgaatcaaactgccattctatgcctttttccattttactccttcacgtgtatcttccaatatgatccctttctcaagcagagtgccgcggatctcgtccgcgcgcgcaaagttcttttcctttcgcgccgcctggcgctctgcaatgagcttttctatctcttcttccagcatatcctcttttttgtcaacaatcaaccccaatacatctgttaattttacgaggcgggaaagcagcgcctgcagataagctctggagctgtgcgcatccgccgtcgtgttgatatatttcacaagctcaaacactgccgccacagcgtccgccgtgttaaagtcatcgtccattgccgcctcaaagcctttgacaaactcctccgatcctgcaaaagcctcccgctcctgggcagtcatttcctcactctttgcgctgcccatgaggaacttcaggttgccggccgcattgacgatacgttccagcccgttcctggacgcctccatcagatccgcgctgaagttcagcggacttctgtagtgggcgctcagcataaagaaccggagcacctgcaggtcatactgttcgctgatctccctgaccgtgcggaaattgccgagcgacttgctcatcttgtggttgtcgatatttaagaacgcgttgtgcatccagtatttcgcaaattccttcccgttggccgcctcactctgggcgatctcattttcatgatgtggaaatacgagatcctcgccgcctgcgtgaatgtcaatctgttcaccgaggtatttccttgacatgacggaacactcaatgtgccagccgggacggccgtcactccacggggaatcccatgccggctccccttccttcttcggtttccagaggacaaagtcaagtggatcttctttttcatcctccccggtgacgagaagagaacgttctccggtgcgcaggtcatccagattcttgtgggagagcttcccgtaatctttaaagctcctcgtgcggaaatacactgtcccgttcttttcgtaagcatagcccttctcgataagcgaccctatcatctccaccatgccgcatatctcttccgtggcgagcggatgctttgtggccggttttacattcatgccctccatatccttcttgcactctttgatataccgcttggatatctcatccgcggacacgccttcctcgatggcttttttaatgatcttatcgtccacatcagtgaagttggatacataatttacatcaaagcccttatattcaaaataccgtctcaccgtgtcaaacacgatcatcggcctcgcattgccgatatggatgaagttgtagaccgtaggcccgcacacgtacatcttgacctttccttcctccaccggtacaaattcttctttttttcttgtcagtgtgttaaacagtttcatattattccttttcctcctctttcaatattactatattatcttcccgcatacacctcatgcgcttctccatctcctggatctgacggtgcatacgtatattgtccttctgaagttcccggatatcgttgctgatcgggtcaggcagatgcacctggtccatatccacacgcgggatcctctggtcgcccatcttgaccacccggcccggcacgcccactaccgtacagttgggcggcacttcctcgagcacgaccgaaccggcgccgatcttggaattctccccgatcgtaaacgaaccgagtatcttggcccctgcgctcaccatcacattgtctctgagcgtcggatgccgtttgccctgctcttttccggtccccccaagcgtcactccctggtaaagggtgacattgttcccgatctccgtcgtctccccgatgatcactccgctcccgtggtcgataaaaagccccttcccgatcctggctcccggatggatctctatgcccgtctttctcgccgcgcgctgagagatccatctggccaggaaaaagtgctttttccggtacagcttatgggcgatccggtatctcagtataaccttgaagctcggatacaggaacacttccatattcgatttgatcgcagggtctcgttccctgattactttcacttcttctcttacataggatattatacccataatcaacacctctgaaataaaaaagccccgtctcttaacacagatcaagagacggggtctgcccgcggttccactcttgtagaagccggtgcttccactcgatacacgtaacgtgtgtgacccgtatccggctacttgtgtgacctgttcgccgaatcgactcccgaatgcacttcatatgtccttccctcaaaactgctttcagccagtgacagcttctctctgttagttccggtacatattactctcttcgttccctgtctttaccatatatatcatataatatgagaaaaagcagtttttgtcaacactgcttttttctccatcacttattcattattcttacagtacgccgccgcgttgatcgccgccaccgctccgtcggccaccgccgttgccgcctggcgcacctgcttgacacagatgtctcccgcggcgtagacgcccggtacattcgtctgctgcctgctgtctgtcacaagatagccgtcttcctgcaaaagcccgggatagatcccggtattcggcgtggagcccgcatagataaacacaccgcagccttcggagcggatgatctgcgtctgcccggtatgcacatcttcaagtttcagcgcctccacctctttctctcctgtaagttccacaagccttgtatgcagcagcagttcaatgttctctgccttctctgccttttctgcaaattccgggaccgctccgagcttatcttcaaaatggatgatcctaagcttccctgcatattttgcaagaaagagtgcctccttcactgctccgtcggcgcctccgacgacaaagacgtccctgccttcatacttttctgccgccttcgccgcgttcattccgacaccgtgcccgcaaagttccttctctcccggtatcccgagctttctcggcgttgttcccgcggcgatgatcactgcttttgccttatatgtccccgcatctgtcacgatcgcctttacgtctccctctaactcggccgacaatactttttctcttcgtatgtcaataccgtatgactcggcctgacgcttcagccgctttgcaaacgacgccccggtctctccttcaacgataccggagtagtgggtcactgtcgacacgccgccgagcagtcctcctacttctttttcttccagaaccaccgtctcaagcccgcggctcgccgcgtacaccgcgctgctgatccctgccggacctgcgcctatcacacaaatatcatacataattcttacctcgctttcgagtatagtatagcaccgaataacgattcgtaaaaattataatatattattttttcataagttctgcttatcctgcaactttttacattttccaccgtatctctgctttgtaaagatctgcctccgtctctatcttaagctttccgccctgcagttccacaaagcttttcgctatggcgagtccgagacctgagccctctgtatttctggatgcgtccccgcgcacgaaacgttccgtgatctcatccggattaaagtcaagttctgcggccgatatgtttttcatccgcaccaccgcgtcgtctccctcccgcagaagctctatatataccctcgtgccgggcatggcgtacttgacgatatttacgagcagattctcaaatatccggtatgtcttctggctgtccagtctgagcaccagtttttcttccggataacttaagcggaattcaagcttcgcctgctcgatcttatcctccagttcaagtttgacctgtttgaacaaattgacaatatctacattgataagatccagcgtcacattttcactgctcgccttgcttatctcaaacaaatcctctatgagcagcttcagcctgtttgacttctgctccagcaccttgatataagactgccgtttctcctcgtctttttcctctttcagaagattcacatacgtaatgatcgcagtcagcggcgtcttcaggtcatgggagacattcgtgataagctccgtcttcatcttctggcttttgacttcctcgttcaccgccatcttaaaaccgttctgtatcttttcgatctctgcgcggaacggactgaatacgccgagatcgccttctatctctgtgtccaggttgccttccgcaatcttgttcgtagcctttagaagaagcgcgtacttatccttcagatcgttgaaatacttcttaagtacaatgaacaaaaggacagaatatacgatgaggccgatgatcccgaacagccagagggagcagagcacgagcagtatcacaaaattgatgagtacgatctttatgatgatcttgttgctcctgtcattaaagtcgatctcatccatggaccggtacagtctgttcatcttctccctgcaccattcccagagccgccctcccagtttttttgtctcacgccagagcctaagggcaagcactttttcctgcacgtactcccggatcccaagcactttgacctgccgcagacagcacgctccccagtagaccgatgcaaagaagaacgtccacagcacaaagtccgccatatcaggaatccctttatttctgcccagtataacgtccacattggacaaaataaggcagaatgagatcaagggtactccggccgcggcctcgaaaggcacatggaatatcttttcttctcctgtgtgaaaagacgggcggctcggaaaatataccgcggccagacacatgagaagtataagggcaaaaatgccgtacacaatggcatccggagcaaagccgtaatagccaagtgtctcgtcgagaaaatcgttaaggttctgctcggacattacatatgtgtaagtcctgtctgcgggccggagaagctgcggggcgtcatattccatggcgtagtcggcatacagatcctcgccggacatattgctgataagccttttcagttctatcatctgactgtctttatactccccggtgaccgacgtcacagacggcgtaccgttcttgtcgtatgagatgacgattccaaccgcgtatctgtcaatgtcagaatcttttaatttctccgcagaacctgcaaggcttttatcgatcacctttccgccggcgtcctgcacctgatattcggtatacggatatatctgcttaaaactatccatcagcgaaggatagttttcgtccagactgctgtcctgaagattccctgcctcctctatattgtagagagcatagttgcttttcagaaataaatcaagaaactcctcagaatggaggtagccttcctttaccttctcttctgtcctgcggctgtctctgtatgactggccgtactggcctatcataatacatgcggacaacagtatcattattacgatcataccgacggcaagtttatgcctgtttttcaattttgtatccaacgccccacaccaccttcaaatattttggttcttttggattgatctctatcttctcacggatatttcggatgtgtaccatgatcgtatctgtcgttatggcccgttcattccacacccgctcatatatctcctccgccgagaatactctgcccggactcttcatgagcagaagcagtatcttgtactctatcggcgtcagtttcaccggttctccgtccaccgcagcctccaccgtgtcttcattgatctccagtccgccgatgacatggacattggcagaggcttctttttcattcagcttctcagcaaatttacggtatcttctcagctgggaattcacccgcgccagcagttccatcggcgtaaacggcttcgtgacgtaatcatctgctccgatattaagtcccatgatcttatccacttcttctgatttagccgacagcatgataaccggaaagtcatgcttctctctcagtctgaccaccatggtgatgccgtccatccttggcatcatcacatccactatcgccagatgtatgtcttctctctcaatcacttccagcccttctctgccgtccgctgcctggtatacctcgtatccctggctcttcagatatatctcaacaccttctctgatctctttgtcatcttccactatcaatacatgattcatttccatcgtcgtccgctcctcatctcatatgttctgtatggcctcaggccacatccggaattaataaataacacctcccttttgcaccttgtagtattaccttactatcggattctaaagggaggcctgataaaaaactaaagattttctaaacatgcagggtttccagaaattgtaccatccggtcgacatttacctgccccggcgcagacgctttgcctgccgccgcaaatgtgaccgaagaaccgaagacttctcccgccagacggcttaccgtgcccatgcttcccatggacattgtgatcaccgggcggctgtccggctcttccctcaccgtgagtgtggcgtcaaggagcgtgagcacatcgcggacgcagttcggcatgacggcgatcttccatatatccgctccgagctccttcatataatgcagcctgccgagcagttcttccttcggcggcgtcttatcaaagtcatggctggatgccaccgccttgactcctgcgctctgtacttctctgatgatactgcgtgcctgtccggcaaaggaacatacttccacgtcaatgagatccgcatatccggaccgggccaccgccgtattgagctgtacatattctgcttcgcttatccgtgcagcgccgccctccttcgctgtccggaaggtaaagagaaggggaatatctccgagcgcttccctgagctgtgcggcggtctccactgccttgccgcagtcttttgcgtctgtgtaccagtctgccctccactccgccatatccagcggaagatcagccagagctctggcctgtgcagcaatctcctcttttcctgtctccacgatcgggacgcagatcttggggcgtccttctcctatttttatatttcttacggtcaccggatccatacagttctccttcctttacacaacttcgttgatatatatttctgacagtggtatgactttgttcagttcctctttcatacgttccgacatgtgcgccccttctctcctgcatgcatcctccgccgtgcatgcgccgaatataagttcaccgagaacggatatgggaatcgtaccttcgctgttctcttccttcccctccatcagcatgacaccggaatgctccgtccctgtgagaacgacgcagcggcagttgtcctctatgacagggtctgtgatgcagaagcatactgcagtcaggcttctgaggctcagactcatgagcagccggcgcgcgtcgacggggcgcaccatgatcagcggcctgcctgtctctacttccggaacatacgggcggcagtccgtgatcactccgtcccgccggtacagcataagcttcccgccgtctgcaccgtactcctttttaagccgctcataataggcggcgcttcggacggcaaagacatcgtaacggctctccatataccggtttgcagcctctgcgagctcctggcattctccatatgaaagttcgcggatgtccgtatccgcacatgcttcatccgggcgctgcccgtctgcacacgcacagaaccttctcttctgctcatacaccgtgcggaaatcatagggcagatagatcgcctccgccgccggcatcagaaaggtgaacgtctcgcctgcctcatacattgccttgagcgcgctgttcagaagcagccccatatagccccgcctgcggtaagccgccctcgtggccaccgccacaatataatgcgccgtctgcctcctgccgtttacactcatctcataaggattgaggtgcagcatcgcctggatatccccgtcttcttctatcacatatatcttgttgtcttttatcttctctgtgtaataataatctacaaagctgccgctgtcatctggaaacacctcttcatagagcggccttgtcaaaacgtgttcttccttggatagttttctgatcttcatctatttactcctttttaaggctaactgtctcgttcaatataaggaatatgtctatgttataaaaatagactgcgcactgcgcaatctatctctgtcaactccttacattctgctgcgcggacaaccggaacatccgccgcacccgccttccgccgggcctaccgcgtagcttgcatttgcgatcgtctcgatgcctgcaacggcctgtgccgatattccttctccggccccggtaaatccaagcccctcttccgtggtcgcctttatattcacctggcttacgtccagatgcagcgcggctgcgacattttcccgcatcttttctatatggggcgccatcttcggccgctgcgcgattatcgtcgcgtcgatgttgccgatgacataaagctcttcctcgaccagcccgccgacacgttccagaagcttcatgctggatgccccttcatattccgggtccgtatccgggaaatgccttccgatatctccaagcgcagctgctccaagcagcgcgtccatgatggcatggaggagcacgtccgcgtcagaatgtccgagcagccctttctcatgagggatcttcactcccccgacgatcagctctcttccttccaccagcttatgaacatcatagcccattcctacccgcatattattactccttctcttcgtcagtctctcctatattgttgccatcctccggagtttctaccacttctgccgtgttttcttcaatttcctccggcgccgtctcctcctgcgcctcttctatcacatcgtcatcctccggctcctgcggcccttctttcagataggtcctcactcccgtcagaagccagccaatacctatcaccgcgaatgcagctcccgccagcgtgtaccacgtatagttcttcggcatctccgtcagggcatccttgatgagcccgattccaagatacgcgagatatcctcctgtgataagccggaatacaaaacgtccttttgtcataatttttatcttctgcctcctgttttctgtacatttcgtctctcttaaaccgattaaaaaaactatatcataaactataatcgaatgcaataacggcggaaaaagcgcatcggaaaaaaattacaaatttcctcaaaaaaagtgttgacattttcccgatttcaatagtataatagcaaagcgggttgcgagagaacaacctcaaaaaatgggatcatagctcagctgggagagcatctgccttacaagcagagggtcataggttcgagccctattggtcccatttacaaaaaaagatttatctttttttgtgtcaatttgatatctggcgggatagctcagttggctagagcatacggttcatacccgtagtgtcgctggttcaaatccagttcccgctactttaaagactcatctgttgtgatgagtttttttgtttggaaatacaaaaggatcgacgatggggtcaggcccctatggaatgtaactccataggggcctgacccctttgcgtggatctatgttctggcagagaacttttttctatacgattccctgggctgtcattgcttctactactttttcaaagcccgcgatgttggcgcctactacgtaattgccttcagcgtcgtagcgttttgcggcgtcggccatattgtggcagatatttatcatgatgccctgcagctttgaatcaacctcgtcaaaggaccagcttaagcgctcgctgttctgggacatctcgagggcagatgtggcaactccgccggcattggcagctttgccgggcgcaaacagcacgccgtggctctgaaggtattccgtcgcctccagagtcgtcggcatgttggctccttccgcaactgcgatacatccgttttctgtgagctgtttcgcgtcttcgatgagaagttcgttctgtgtcgcgcacggcagtgcgatgtcagcctttacggaccacacgccgcgcccttcgtgatactcggagtttggacggtagttcttatattccgtcagtcttgcacggttcacttccttgatctctttgagcgcggacacatcgatgccgtccgggtcatatacccacccgttggaatcgctgactgtcacgacttttgcgccgagctgctgtgccttctgggtcgcgtagatcgccacatttccggaaccggatacagcgatcgtcttgcctgcgatgtcatgcccgttgatcttcagcatttctttcgtgaggtataacaggccatatcctgtcgcttccgtccttgcgagggaaccgccgtagctcagtcccttccctgtaagtacgccttcatatacgccgcggatcctcttgtactgtccgaacatataaccgatctctctggctcctgttcctatgtctccggccggaacatccgtatccgcgccgatatatttacacaactctgtcataaagctctggcagaatgccatgacctccctgtctgatttccccttcgggtcgaaatcagaaccgccctttcctccgccgatcggcagacctgtcagcgaattcttgaatatctgttcaaacccgagaaatttgatgattccgagatttacagacggatgaagccgaagccctcccttgtaaggtccgatcgcactgttgaactgcacgcggtatccggtgttcacctgcacctggcctttgtcgtccacccacggcacacggaacttaaactggcgctccggttcaacaagccgctcaagcagcgcatctcttctgtacttttcctcatttgcttccaccactactctgagcgattcgagcacttcctttacagcctggtggaactccggttccgccgggttcttggcaactactttctccagcacttcatcaacgtaagacatattaactcctccttggtttttatattcattcaggcgggcagattcgtgtttcctgttatgtcagagaaggaatagaccaaaccggctattcctccttacctctctgtccatttaccatcttaaagtattccaatggaaatgacaagaatttttttggttttttccacttttttgcaacttttccatttcattcttgcaaacatattgttttttatgcaatattcatggttttcgcatctcaaattgcatgtttctaaaatattttcttcaaatcactcgcctttttctttctcatttccccggcttcgcagccttttcccggcgacagccgttatcacagcaagggcacagactgctgccagtatatagactgccgccggagactcatctcctgtcgcaggacttcccgcccggtctgtctcagccggactgccatgtccagacgccccgtacgcaccgtacgcgcctgccccgccaccgttcgttccgggacgcagcgccggacctcctcccggctcttccgggtgaacgccgcccggcaggccgctgccgccattgatatctccgcctgttcctggctgcacatcttcatatataagtgtgtatacagaaaaccggtctgtctctatcgtcacggtatctgcctctgtatccaggtcctgaagcacatccgcagccagcgctccgccggcggatccgtgaacgcgcacgacggagaatgtccgccgctttgcatccgccctgtatgcctccggcacaccgatcacgatgcgcatgggcacgccgggctcggcgatcttcgtctccgcgccgttctttatcttgaagaaattaatatcaaggcttgccgccacggcctgattttccttcatggctccttctgtcgcggctttcacgctgctgtccatatgatccacttcatggacgcgcagttcaaatccgatcacgctgccgtccgtgatctcctttttttcttcctccgtcagaagtgcatccgcaagctgcctggaatcttctacatttacctttatccccgcggcgccctgccccatattcacttccacattctggtccggacctgtctgtttcctgatcttccagagtgaagccgtgtctgttacctcgtacgaaagctcaccgtttttcaagacgaaccagtctgcagccgagtccgtgtctgcgcacgatacgagaacttctcccggttttactccctgattgataagctgggccggcaccccgtccttcttgccgagatacgccctgatcgtgagcggccggttgagcgcaatgtcgtcaaagcacgtaagcgtatccgtcaccgtactgtctgccagcacgagagaagaagtacacgcggacgctgaaggattccctttcgtgtccacatgtccgccccatacattctcagttgtcacagcctgtaatacagtcttaattttctccggcgcactgctgcttttctcctggccgtcgctctccccggcggcgtaaacggacggataacactgctgccccgcatctcccagctccttgcaaaaatatccggagatatcggaaagttcgatactgaccgctccggagcgggccgtcccccctaaggaagcctcaccgctgccatagatatttccggcgacttcacctttgcttacagccagactcacagccccctttatatccgccgaggaaccgctgccggaggcttccccgcctccgtagaacgcatggcatacccagtagtcttcaaactgctcctccaccggtgtgacgcacgccgtcacgtcgatatccacagacccggcccgggcgctgcctccgccggacgccgtccctccgccgtacagataaccatacagattaaaacagttctgcacctgtatggatatgttgcccgccacatccgcgcacgcttctttgtcagcggttcctcctccgcgcaggatcatcatctcgttgccgtccacagtaatctccacagtccctgcttttgcctgtgcccctgcaccggacgcggctccggctccgtatacttcccttatatccaccttgctaagcgcgatcgtggctttgcctttcacatctgcccgcgcagtgcccgacgctccggcggcagctgacgcgcttcctcctcctctgaccgagtaggtgcagccgtatacagacaatgttgtactccccacatctgcgcatgcgtcaaatgcgcctgtcgtatacgccttccctcccccatatatataatgatggtagttcaccggttcatccaaagcggatatggaagcacttccggacacattcgcagaggcattccccttcttcccttctgcgtaaccgccgccatacacagaacctgcgtctgcgctgccggtgatccgtatggagacactgccgtcaacatccgcactgcccgtaccgtcggaaaagcctcccccatagacggtgctcacgtacacgccgtctatcgtgatgctgacatcccccttcacgggttcatttttcccgccgccgtatacggtgttcagggagctgacaggtgcatctataagcttgttctcacctgtcccgtcatatacataagtgcctccgctgacactgtcctttttaagcgtcactgccgccccgtatgtgtagagcgtaccgccttccagaaggaccggctgtccggcgctcttttcgtccgtctccttcagagacgccggcgaagtgttcacgggatcgccctgcccctgcggagcacgctcagtcccgccgtccgccgcctctttctgaggttccgtctcctccttttccggttctggtgtcccgcctgtatccgcggtgtcttcaggaccggccgattcgtcttccgccttgcctgtactgtctcctgtcttgtctgcgctgtcttttgccgtccccgtctcttcttgctttgtccccggctctcctgccgcgacgtcttcctgcgcaaatgcggtacagacaagattgacggacaacagcaacgcggccatgactgcgcatatctgtctttttcttttcatcccttactcccccgttctgaatttaatgtcaccttgtgttatgattatcattttatgcaattgtgtcctgtgtgccacggagaaatgcggatgcaaagaaaaaacataccctgatgtgaggtatgccgggcggaagggcagaaactcccctttccatgagtgcagccggctgccatacatgtcatttctgcttaggccctctggctttgtcaaatattgctatatatttccatctgttcacgcgcaaaaaggacgggcagttaaaattgcccgtcctttactcggtcttgtctgtcttatttaaaatatttcacgccggattcaaagatcttcatatcctgttctccgtatatgttcactgccacagagcgcccgcgtctctcagagtgcgccatcttgccgagcacacgtccgtccgggctcgtgatgccttcgatcgcgtaataggagccgttgacattccattcttcgtccatgcttatattgccgtccggatcacaatactgagtcgccacctgtccgtttgcaaacagacgggcgatcgtcttgtcgtccgccacaaatcggccctcgccgtgggacgccggattcgtatacactccgccgagttctgctcccgcaagccacggtgacttatccgtcacgactttcgtgtacaccatcttggatatatggcgtccgatcgtattgtacgtaagcgtcggggaatctgcattctgtccgacgataccgccctccggcacaagtccgagcttaataagcgtctggaaaccgttgcatacgccgagcgccagcccgtcgcgctccccgagcagcttaagcactgcctccttcatcttctcattctggaacgccgtcgcaaaaaactttgcggaaccgtccggctcgtcccccgcgctgaatccgcccgggaacatgatgatctgagactgggcgatggccttctcaaacacattcacagaatcggtgatgtccgccgcgtccatattgcggaatacctttgtgaccacccgcgcccctgcgcgctcgaatgctctcgcgctgtcatattcacagttcgttccggggaacaccggtataaacacgacgggctgtccgatcttgtgggtgcacacatgtacgtttgaagtgcggaagcacccgtcctctccgagtctgccgtcctccgacgcttttccggccagaaagaacgctgtcgggccgccttctgcctctgatctggtcgggaatactttctcaagcgtctctgtccacgcggcgccggcctcacagaggtctattctcatatcgccgtaagaaagcgcggcatccgctgtcacttccccgataacggtatacgtaatgctcagttctccgactttgtccgccggaacttccgcgataatatctccgaatgcaggggcgaacagatcccgcgcgtccacgttgtgttcgatcttaacgcccattttatttccgaatgccatcttgctcactgccgcggcgatcccgtgccggtcaagcgcataggcggatatgatctttccgctgcggatgtcgccggtgaactttttgtactgatccatcacctgactatacaccggaacgtcatacgcatccgtctcgatgcgcagccacacgagcttactgcctgccttcttaagctccggcgtgatgatatctttctctgaagccacatctaccgcaaacgacacgagggtcggcggaacatcgatctcctcaaatgtccctgacatactgtccttgcctccgatagacggcagtccgaacccaagctgggcgttgtaagcgccgagaagcgctgcaaaaggctggctccatctgtgcggatcctctgtcatgcggcggaaatactcctggaacgtaaaacggatcttgctgtggtccccgccggccgccacgatctttgcaacagattcggtcaccgcatagactgctccgtggaaggggctccacgtagagagatatgggtcaaatccataactcatcatcgtcactgtgtcgcagtccccggtgagtacaggaagcctggccaccatggcctgtgtctccgtcatctggtactttccgccgtggggcatgaacacggaagaggctccgatggaaccgtcgaacatctccacaagacctttctgtgagcacacattcaagtctctcagcgtatcaagccactttgccctcacatccttcacttcttcccgcacgagaaccgtatcttcacggttcggtatatcgacgctcactgcagtctcctggtgggcgccgttcgtgtcaaggaaggcgcgggaaagattgacgatctcctttcctctccaggacagtacaagcctcggctcttcggtcacgaccgcaacctttgtggcctccagattctcttctttggcgtacgccatgaattcctctacatctttcggatccacgacaactgccatacgctcctgggattcagagatggcgatctccgtaccgtccagacccgcatatttcttcggcaccttgtcgaggtccactctgaggccgtcggccagctctccgatcgccaccgacacaccgccggccccgaagtcgttacatttcttgataagcctgctcacttcttcccgtctgaacagacgctggatcttccgctccgtcggcggatttcccttctgtacttctgcgccgcacgtctcgatcgactcttctgtgtgcaccttggaggaaccggtggcgccgccgcagccgtcgcggcctgtgcggccgccgagcaggatgatgatatcgcccggatcggacgtctcacggatgaccgcacgtctcggagccgcgccgagcacagcgccgatctccatacgctttgccacatagttcgggtgatagatctccttgaccgcgccggtcgccagaccgatctggttgccgtaagaactgtagccgtgagcggcctcccgcacaagcttcttctgcggaagcttgcccttcatcgtatccttcacggatacggtcgggtctgcggccccggtgacacgcatcgcctgatacacgtaagtacggcctgacagcgggtcacggatcgcgccgccaagacacgtagcggcgcctccgaacggttctatctctgtcggatggttatgcgtctcattcttaaagttgacgagccactcttcttccaccccgtcgaccgttaccggcacgacgatactgcacgcattgatctcgtccgactcttcctggtcttcaagcttcccttcccttttcagctttctcatggccatcagcgcaaggtccataaggcagacgaacttgtcctctcggcctttgaatatctcgctgtggtctgcgatgtactgcttatatgccgcttcgatcggttccctgtaatcgccttccccgaacgtgatatccttaagttcggtggagaaggtcgtatgacggcagtggtccgaccagtacgtatccagcacgcggatctccgtcatggacgggtctctgctttcctctgccctgaaataatcctgaatgtgccggaagtctttaaatgtcatggcaaggccgagggaacggtacagctccataagctcatcctcccccatctctttgaacccgtcaaatatgatcacatcgtcgggctcttcaaacgccgtaacgagcgtctccggcttgtccatccctgtctctctcgagtctacagggttgatgcagtgttctttgaccgcctcaaactcctcgtctgtaatgctgccttcgatcacataagtcgtggcagtgcggatgaccggctgctcgtccgccttgataaactgcacgcactgtacggcagaatccgcccgctggtcaaactgtcccggaagaaactccacagagaagatcctgcttccttccttcaccggaaattcttctttatataaagtatccaccggcggttccgagaaaatcccgttcagagccctctcaaatatatcctcagaaatattctccacatcgtaacggatgagcacacgcacatcctctatcccgctgatgccgagataacttttcacttcatgcctaaggtcttctgcctgtacggcaaagcctggttttttctctacatacactcgttttacactgctcataaatcttcctccgttcatgaattctatgattcccttgttccatcataacatacttattgttattagtgtaattaatataacttaacatttttataagtattacttatttttattctcagctctttttgacatggcgaagcgccatatacccattagaagcccgatgacggcaaggctccctacgaacacgagcccgatacgaaacgtcatgtcggaaaagaagccttccggcagcatgcgtatcatatagtctgtggcagggtcaaagagccagaggtcgtttgtaaaaaatatctcatggaatatggtaaagtatttcgtaaaatcagacgcgaacagcagtcccagcaccagcacgatgatgagaaacagtcccagtcccgcaaaataagctcccggaatgagccgcttcaagtccgctttcatgactgcgagaagaagcagcagcagaaggaatacaacgaggcagaccgtccgcactttgagccctcccagaaaaagattcttcacatccgccatgtgcgccctgtcctgttcattaaagaagtcctgccgctccccgtccacatccgtgatcacagacagctcctcctcttccccgatcaggtaggccatcatatgctttgtgactgccatgacctccggcatctccatgccgagatcttccgtcacgttatatctggcatattccttctcataaaacttatagtctggatctccgtacgcggcaaactggaaactcgttatcaaaatggctgtgatcagaaacagcatcgccgctgcagcaataattttgtgtgcttttttcatctcttacctcctccgtattcatcttaccatactgcatattgtaattcatccttttttggcttataatactcagtatatttataaggaggacttataatggatatcaattatgaactgtacaaagtattttattatgtggcaacgactctgagcttctccgaagcttccaaacagctctttatctcccagtccgcggtgagccagtccatcaaggcgcttgagaagaagttgaatgagacgctctttatccggagcacaaaaaaagtccggctcacgccggagggggagatacttctgcgccatatagaacctgccatcaacctgataaagcggggagagacacagatcatggacgccgcctcacacggcggacagatccgcatcggcgccagcgacaccatctgccgctattttcttgttccttatctcgagaaattccacaagtccttcccgggcgcccacatcaaagtgacaaacgccacctccatccgctgcgcggaacttctggagagcggccaggtggatctcattgtcgtcaactatccgaactcttacctcggcaatgcggcttctgtgaagacgataaagacattccgggacgtgttcatcgccaatgcatccttctcctccctgaaagggcgggcgctttccttccgggaactgctggaatatccgatcctcatgctcgataagaagagcacgaccagcgaattcctccacgccctgttccagcagcaccagctggaccttgtcccggagatcgagctgagcagcaacgacctgctcatagacctggcgagcatcggtctcgggatcgctttcatcccggactactgtatcccccacaaatccacggacctctttaccgtgcagacgaaggagaagctgccgaggcgggaactggctgtcgcctacaatgaacacatgcctgtgtcaaaagcagtagaagaattcctgcgcggtcttaccgggccggaagatacgcaggcataacgcggtgtcaatcatcctgttcccagaacgcgcgcattagcgcttctacatttctcaggctgcagtaccacatggacgtccattcccgtggaaaggtctctctgtatcttgtatcccggaaacgctcgtccagaagcaggatgacgcctctgtccgcgtccgtccttatgacgcgccccgcggactgcagcaccttgttcatccccggatacagataggcatagtcaaagcctctgtatcccttcccgtcaaaataagtctttaagagctctctctcgcggcacacctggggaaggcccgtccctacgatgaccgccccgatgagcttatcctgcgcaaggtcgatcccctccgagaagatgccgcccatgacacagaatcccatgaggctcctcgaccgttcttcctcaaagttctcaagaaaaatctcccgcgcttcctccgacatgtactgcgactgaatgacatattcaatatcttcacagtcctgcgtcagagcggcaaatgcttcgtatacctgctccataaactgataggacgggaaaaacgcgatataattccccttttttgtctgcgccaccagctttaagtaccccgcatagcgctcatacatgtccgccccccgcctcgtatacttcgtgcttacgtccgtaccgagcagaagcagccggtgctcttccgtaaagggcgactcggcatagactgcataatcgtcgctctgcgtgctgagcagctccttgtaataatgaatgggcagaagggtggcggaaaaaaatatggtactgttccccttgtcaagaaattctttcagattgccggcgggattcacacagaacagacggaccttaaaccttccggagttctcaagctccgcgtatatgagatagttctcatccagcctgtcatatatgccaagaaacatgcgcacggcaaaatacagatccagcaccttcttccgcttctcttcctccgtgcattcctccagataccgctccagctccgccatgagattcataagcttcaaatagatgtgcgacacactgtccagcacctcatacgtctcacactcccgcttgagcgccagcatctgtttattgcattcctcaagccgccccgccagcttcgcgtcctcctgctttacgagccttttgacctccagcagatcctccttgtacagagcggcgctgtacatctcccttccccgctccacgagattgtgcgcctcatcgatgaggaacagatattcgccgctcacgccgtcgccgaaaaagcgcttcagatgcgcgttcgggtcaaatacgtaattgtaatcacagatgaccgcatccacccagagcgacacatcaagccccatctcaaacgggcagacgttccatctgcgcgcctgctcctcgataacgtccctgctcatgtcgtcggaggtggtgatgagttcatacaccgcatcattcaccctgtcgtaatgccctttcgcatacggacagtagtccgggttgcagttggtctcttcacagaagcagatcttctcttttgcggtgagcgttatgaccttgagccgcagcgcctgttccttcagcgtctcaaacgcctgctgcgccacagttcttgtgatcgtcttggccgtcaggtaaaatatcttctccccaagcccctcccccactgcctttacagccgggaacacggtcgccatcgtcttgcccaccccggtaggcgcctgtatgaacagcttctttttcctcagaatcgtccggtagacagaagatacaagttctttctgtccctctctgtagctgaacggaaattccacgccctttatagacgcgttccgcttttccttccacttaagctcatacctggcccatttctcatactgtccagccacttcataaaaccacgtctcaagctcctctgccccgtagacaaactggaaccgcttgatctcttccgtctccatattacagtatgtcatctggacgccgatctctttaaggctgttctgcttcgcatagatgaacgcataacactttgcctgggcgagatgtacttccaccggttcgcccagcgtgtgaagttccttgaacacgcccttgatctcgtccaccacgaccttgccgtcctcttctataatgccgtccgcccgtccttcgatctgcaggtcaaagccgcggcagccgaccacatactttaggcccacctccgcgcggtaaccggctcccatacgccgctgtatcttccggtggatcttacctccaagcagcatggcgtctttatccgcccccgctgtccggttatctatgtccccgccctgcaggataaactccacgagcctgcgcacggatattcttattaacggctgttccatatgctctcttccttcttccgcgatagtcactgcttaaattctaccatatttttctgaaaccgcaatggcaaatgctgtaactgtctgctccggctctctcttgactgtatggagatcgtacggaagaagccctgccagaggcgtgcatattcccgttccctgtccgatatattgtggaccatctctatattgagctgctcattcagcccgagcacccactttttccccgcctcgtgtacgacgaacgtcttgtgcgcattgtcgtagatcatccagttctcccgcggaagccggtccgcaaaatgaggcgccagacaggtgagcacatgattcttcggcgtgatctcggcaaaaagcactccgttcaccagctccctgaaccgcaaaaatcccttgaatgcatgcgcctccccaccgacagtgcggctcagctcaaacaccttctccaccgcaggatggctcagatgttccatgatcctccggctctcctttattcttctggccgccagcatcgtgccaaggatcgcgtcccccttgcctgcatccgccgccagcgcggcatggtagatatcccagtaggcgggcatgccgaggtgcttctggatcatggcctccacaacgaccgctttgtgctccgtctctttcgtctccacatattcacagaagagctgctgctccagcgtccctctcagcgcgatcccgcacgtgtcctcttccccctctgccttccatgcatcgtatataccggaaaatatgccggttaccgtatccgtacagatatagatcgtcttcattgtccatctccccgcattgttatttatgaccttccgaagcgaaggctgaccgctcctgctgtcccaaacttcatatcgtcaaagagggagagctgccggtaagtcatccccgaagctccttccggaagtttttccttcgtgtccagaaggttccgcgtgataaagtcttcctctatcttaaccggatacatcatcctgccgctgcatgtgataaaatacagcgcccgcttcagcacgacgccgattttcttcaagtcgtgaaagtccagtgtcccgagccgtctcgccttcacgatgcgcacggcggacttgtaaccgatgcccgggacgcgcagcagcatcttatagtccgcgcggttgatctcaaccggaaactgttcaaggtggctgagcgcccagttacacttcgggtccagcagtacattaaagttcggattctcctccgacagaagctccgacgcctcaaaatggtaataccgcagcagccagtccgcctgatagagccggtgttccctcaaaagcggcggaccctcgtccgtccgggccggaagggtcgcatcgtcatttacgtggataaacgccgagtagaatacccgcttcagatcaaactttttatacagcgattccgccacctgcatgatctgaaagtcgctctccggcgtcgccccgatgatcatctgtgtactctgtcccgccggcacgaaccgcggcgcgctccggtacgtctgtatctcgtatttgttctccgccataccgttctgcacgagccgcatgggggccagtatattctttctcgtcttatggggcgccagcagcctgaggctctccgccgtcggcagttccagattcacgctcatcctgtccgccagaaaacctaccctgcgcacaagttccccgtctgcgcccggaatggccttcacatggatatagccctgaaaattacattctctgcgaagcttgaacagtgtggcatagatcagttccatcgtatgattcggactcttcaatatcccggagctcaaaaacagcccttcgatatagttccgcctgtaaaactccatcgtcagcgtgcagacttcctccggcgtaaaagacgtccgcggcacgtcgttgttcctccggttgatacagtacctgcagtcatagatacattcattcgtaaaaagtatcttcagaagagagatacatcttccgtccgccccgaagctgtggcagatgccagtctgctcacagcttcccatcccggtcccgtctccgcttctggacgttccgctggacgtgcatgccacgtcatatttcgccgcgtcggacagaatattcagtttgtcgtacatggacattgtctcctggatcctcattctccgcctccgtaaataatttattttacccaaaagcaatgggaacatgtgtttgattatattttacaaacacatgttctttttgtcaacacatttttgtgccttgacacgaacttatgttcgatgatatattgttttcaacagaatgactgtattattggaatttcgcgcaatacatattctttacaaaggaggtgaacacagtgaccatacaggaactgaaagacaccatgtacgtatatacgagcccccattccgcggccccgtccgtccacatgacagacgcccagtggcaggagaaattccgtctcatgaagcagacggtccgtccttccgggctgcggcgcatgccaggcagccgtatatgtgaggctgtataccgtccggacggttggcacgatacatacgacgggatcacaaactggcagatgtacgcaatgtacatcaacgataccctgtcgcagctgcgcctcggcgagacggcgtacgcctggttcacataccagatccgcgacctgctgcggtttgagcacgaacggctctgctcccgctactgtccccgtgaccggatgtggacactctggctaagtggcaggccggctcaaaaataatgtgaagaaggaggaaatatcatgaaaaagaaaagcaacggcgcattgtctagacaagtacatatctactcccttgagaccggctgtttttatacagagaaagaagaacagctccaccgcaggatggcccgctacatgaagcataaaagcacgctcagatctgcggacagagacggatatgacgccccctgcacggaaaagtacaaggcgctctgttcacatgtaaacaaaaaaatcaaagactacaaagcgctgctgagcgaagagctcgtctcggacccgtccatcgtccgcacactgccaaaggaaaagctgacagacacaaggatcatctctgtctttgaatccgccctcacccgtgcggccgatatgaagaccggcgaacttacaacagacattatggtcgtacagacttatttctacgatgtgataaagcagcttatcacaaacggctattatcataacggggaaaaatacgtctatttcacatcctccgccggccagatacggaccaaaaagaccgtatttattaaagaacggctcttaaacaagatagaaccgtcgctcgtctgcggactctccaggcagatgatcaacgaaggcggcggcataaacgccaacaaatacctggcttatctcgccctgtcaaattcggccacagagccgtggacagactttgatataaggaaatgtatcgtcgtcccggacttcgagacgtctgtccgctgcagcgtagactttatccacgacgatacttacaagatcgagcggaaggagatggacgtccccatcccgcacacggacgggtgcggcatgatacttcccaggctgtcccggaagaatttcatggtacgtcttccgtggatgaaagggctgctcgcctcctttgactttgtccggttcatccgggaacacgacgcctcccctgtcgtcacagacatctacggaaagcagtggaacatcctcacggaccgcatccaggtaatcttcaccgaaagccagttcaagatgagccggttttacacttcatgggagcagtatcagcgatcctttgaagcgtgcggctgccaggccggcatctgcaacatggaagaagattattttcccgacgccacgatcaattaccagatgctccagacactcaccgacatcacagaggaagaggccgcgtaccttatccgtccttcccttcatacactggagaagctctcctccgacaagaagaccatactgcgcgtcttcggagccgtccccggaaacccggacaagacatggctccagcaggcgcttcttctctacccggagatgatcaccgacgagtacatccgggcaagactgcgggagataaagaaaagccttgtgagggaataccgctccgggaagcttgagatctatggcaaatacacgtttatcgtgccggatctgtacgctttctgcgagcgtctgttcctcggcatccgtgaaccagaagggctgctcggaaacggggacgtgtgctgccgcctgttccccggcggcaggaagctggactgtctgagaagcccccacctgtaccgggaacacgcagtccgtctcaatgccagaaatgaggcctgcgcccgctggtttacgaccaatgccctctatacgagcagccacgaccccatctctaaactgctgcagttcgacgtggacggcgaccgctctctcgtggtggccgaccccgtatttgtagagatcgcggagcgcaacatgcacatggatgacatcgttcccctctattatgagatgaagaaagcccggcccgcgccgctgaccccggaactgctgtacgagggcataaacgccgcctacagaggcgggaacatcggccgctacagcaacagtatttccaagatattcaactttgtggactggagccgcgcttcaaaggaaaagaagcaggaggcactcaacgtcatcaaactgctctgcatggagaacaacttctgcatcgacatggcgaagactcagtatatgcctgaccggccccgggagatcgacgcgctcatccgcacctatacgagccaaaagcttccccacttcttcctgtacgccaaggacaaaacagaaagccaggtggagccgggcggcggaagcttcgtggaccgtctggagacctgcatccgctaccgtccgatccgccttgccggaaaaaacttcgggaaatttacttatacaaagctcatgtgccgcccgcgcatccagatcgatgaacaagtcatcgcggcatacggccgcctgaaccggaagtatcacttccgcctgaacccgggcagtgcggacaatgtggactacatcatcggctcggtaagacaggaactgctcggcttaaactacagcgagacagaagtgtgcgacatgctcgtaaagcatctgtaccgcaaaaagacgccccacaaagagctgctctggcagtgcttcggacatgtcatagtcgataacctgaagcacaatctgcccgaaggcagtatccagtgcgaaatctgcggcgcacgcttcgtcccggcgtcaccgaaccagaaatactgccttgcctgccgtacgatacgtcccgccgacacaaagacaataacgtgcgtggaatgcggatgtgcggtggaggtggacgcaaaggacacgaagacgtgccgctgcagcctgcaccgcgcggaacaccagaaaaagctccggcaggagcagaaccggcgcgcttatgaaaagcgcagacagattcagcaggcagcaagcgcagttacataatcccgcagcccccgtaaattcgttgttttcgccgttttaacagaacatatgttctattccagagagacccggacgccagtatttacaaggcgtggcaccatatttttccaatttgcctacaagggaatgatacccgcacacttcttttcatattcctttctccggaaggagggccggtctgcagcaggccggctctctttccttctctcaggaatacagatgcatctgaaacaaattatgaaggaggaggatgtctatgaacatcaactggaaactgcgtctcggcaacaaagtaacgctgaccgcggtcatcatggcgatcatctcactcgtctaccagattctcggtatggcgcgtatcgttcccccaatatctgaatcccagatgatagagaccgcaggaatggtcatcaatctgctcgtattgctcggcatcgtcacggacccgactacagaaggagtctcggacagcccgaaagccctgacttatgatcagccaaagcagaaagaacagccataacgcctgtggtattttaaggaggtgaaataatggaaagaagtaaaaacccattggaaaatctggggaaaataaaggacacactctcagaccttttcctggaagacgaactcgtgcagaagctgattatgcccgtccccggcgacagtcagctctctcttaaggaaaactgggcaaaccactgctttgacactgcggtgccgcccgcttccgtcggggaaaaccaggccttcctctgtcttgagacagacgccccgctgacgtcggaagccgcgctccaggtgcgtatcactgtcaatgtatacgcctgcggcagcatgcttcatatgtctgacgccgaaaagcaggaatacactgcggttcacggactggccggcaaccggatcgacatggctctggccgccatccaccgggcggtcacagcagatgagacgctccttcgcacattcggcaccggacggatgcagcttgcggaggaaaagcctgtcacttctcttttgcaggatgaacgcttctatgggaaatctctgtgctacaccatttaccagatgcctgtcaggccgaaacggcaggtggtgtgatgaagctggattattatgacctcataagtcccgccccctttaccatacagggtgtgggcagtatccgcccgctcacactcagggaagtctccagactgaccggccggatctactccacttatctcgcacttcttaacatatccccggaaaaatactgcactgaagtaaatgaaagtctgaaaccctggtacgagaacttaaatgaagaacaattatcgtgccttactatgtatgatatcgccgtgagcagcgccgcgctgcagcagtccttctccgccatatttgacttcttctttacggaacgcgtcatgtatgacagggcaaaggatgcttttctcgtcttttctcccgtcaaggatgatgaaggaaatgacagtatccgtgtcacaggaacgatccacaagggcaattacctggaagtctgtgacaccatcctgcagttcggacacatcgacacaaaggataccgtggaccctgccagggtgaaaaacaaaaagggtctggcccggtatcaggaaatgcagaagcgtaagaaaaagaaccgcataaagcccaagacggatactgaccttgagcttgccaacattatctctgccgtctgtgccatgcacaacagcattaattatacaaacgtgtgggatatgactgtctatcaactctgggatacatttgcccggctgcgcaacaatgagatatacgcatccggaagaacatccgtctccgtgtggggagacaaagaaaataagtttgactataacttatggttcaaaaacattacaactacaaactgacccggtccatgtgagaaccggcagaaaaaacaggaggatttttattatgggattaaattcaaaaatggctaacagagaagttcagaaactgattttcaaggattacacatccaagaaaccattcctgaaccttgactttgcaaacacatctacaacagagcttacaggcgagactatgttcgcttacggcggacagggacacccaaagagagtgtcctttgccggcgaaaagggcggaacgctcacgatcgagacacagatgcagtctgtaaagctgtgggaactgatcacaggcggtgatgtgtccaaatcagcaaaatacacaaaaagagttgtccttccggtagcagaaggcaaggttacgcttcctgaagctccggcggaaggattcgctcctaacttctacgcagaagatgacgactgcggcaaagaaatcagcgcttccatgacaggcgcatccgctactctggctgatgccgacggcatcacatccgtagttgcatactacgtaaaagaagtcacagacaaagtggaacggatcaacatcaaatccacaagcttcccgaaagcatttatcgtggaaggcgagacatacatgaagacagaggatgacgatatccttccggcaagaatgatcgcctacaagtgcgttcctcagtctaccatgtcacttgcatttgccaacaacggagatccgggcgccgttacgatcacctgcgaccttctggcagacaaggacaacaacatcctcgaccttatcgtggaggaagaagcataattccagttttatcagtattgtagtttagcctcaccgctgccccatgcagccctgaggcggcagcgggcgtcctctgtgcgcctgccgcctccccatcaagggcagaaaatacaatacggtattttctgccctattttttacacatcaggaatctcaacagaagaaagaagggaatcatcataggcagattaagatttgacacattaaaagaagcctttgcatgctacggagaaagcagccttgtgcccatcgacacgttgccccagatactcatgtatgcgaagtccggctgccagccggttcatatatgtgaatccgagcggccggacaaaaaaggcaagatcgtatgctggtacttaaaatccgaaacacagtacgcatacagaaaatggaaagaaagcaaacccaataaaggaggagacaatttaaaatgagaaaagaaaatccatcgatcaaaaccactctgtccatggaggacagaatactcatgccccaggaactggcagaaggatactttacaaaagacagcgaaggccacgtaaattacacgccttactacgctgatatgatgctgatcaacgtattcttcctgcactgcgtcgacggaatcgcctttgaagtaaaagaggccgaaaacggaggaactgagatcgcagaaaacatctacgaggccgtcacggcagatgaagaactcatgaagctctacgacgagttctttgaacaggacaaggattccattccttcctgcccgtacaaagagaccgtcatacagatgtacggcattctctccgacacagagaagatggtagagttccgaaagcagcagatcatccacgaaaaggaagacgcgctcaccgctcttctttctgccgccgcaaaaaaaatagaggccgcagacccggatatgctgaacctcagggaaactctggaatacgtaaaggccgcatactctccggtacaggccgggtaaaggcatggaacctgtaactaaagaaacagatgatatcgtgtaatgcgcggaggtattaaatatgaataacagtgattatgtgaaagtcctcggtgtcacgttcgatgccctggaaggtctgaccgtagttgccgagagcaatgtaaaagatttagaagacgcgggacggtacgcggcagaacatgacgatggcgctgctatctggatatgcgtcccgtgcagatgcgatttttatagaatctttcaaaaaatcaaataaaagaagggaggattccattgagtgaacaatataacataaacgtacagcctgtattaaatacagacgcactgtacgaacaactcaataatcaaaaatataaaataaacgtagaggttgacggcgctgcactgaacagtcagctgcagtctgcagtgaacagcgtgactggcggagcagcacctgcgaaagtgccggtggagtttgatgtaagcggactaaaagatagtctaatattctttaacacatttatgactagttctaacaatttacaaggcatttttacctcattatatcagaacctggattaaccaaaaaacataaggttacacttaataaaatttaagtgagtctacttcacaacaagaatatgacaaataaggtgtcatcgacaagttgtgttaatgggggttctttaaatatacccaaaggagtattggagggttggtaattcctctttgctggaacggaaagtgatatgaaaccgaaacagaactggcgacagtatatggcatggtttgaaaattcatatggcaaacgatgtaatttgatacataaatgtcccaatcagcagtacactcatctgacgatagttgaatcatataatctgctaaaacaggataaagattcttaacagtgaggatattcaacgactacccatccttgtagttgacatgaccttatattgtcagctattaatgtatagtctaaagtgtgatgcttggaattttaagcatataaatattacccgtcaacaatggtgcttctctcttactattgtttacgtttgtcattagagagttcacaatatctataatttaatcactctttttttatcatttgagagtattattattgtttttattgaatattaattcttaaacaggcgtacgaaaaatataatgacaactgttacatttataatactttctgtatactccccaatcagaattgaccagacctttttttcgtcttatatcagtacttccgcatcttggacaacggggcttcggcggacttttgggtagactggcttgattataatcttgcattctctttaatgcttcattataatctgccggtatctcattattattaaatgtgatcactgaatccaacatcgtatttgttggtaaatgatactcttctactgcagctacataaatcttggctatatctgggtgttctgggttttcgtctattatatcctggatttttttaagattatatatttttccatgtattttacagtaatatttgtttttccccatttaatcttaccatctaatatattttcttgtttttttaatttttgttctgtatacggaaagataaaacgaaattatatagcatcgaattataattagcaaagaacagtagtgaaagatatttactttcttaggtaaagagtattttataactacccttcaaatctacagcttacacattaatccttcttcataacactatccaaggcatacatcctgtacaactgacagaatgtgtactttttacataaactcaatagcagaaatgtaaattttcatctgggtcttctgaacgtattcatacaactataacaaatataatactcttcaaataaattagtacctacgagtccttgccttcgtcttatatctgtactcccacacctgggacaacggggcttcggtgggcttttgggcattctagcctgattatattcctgccaccttcttaatgcctcattataatcggatggtatctcattattattaaaccttaatacgctctcaaatgtatttgcactcactatatccataccgtgttcctcattcattatcaagatgatgttccgttcggatttaccgtccagtacttcctgtacatctgacaggttatatattaccccgtctattttacaataatatttgtttttacccatatccttttctaaaatcctctattagtattaatgtatattaacaatacccttaagtctgtcctttggatgaaattatttttttatcaattcatccaagacttaccacattttttacaactccatcgctttacatagacaccattatccgcatctatagtatcataccatttaatagtatctgtacttccacaccttgggcaacggggcttcggcgggcttttgggcattctagcctgattatattcctgccaccttcttaatgcctcattataatcggatggtatctcattattattaaaccttaatacgctctcaaatgtatttgcactcactatatccatcccgtgttcttcatacattatcaagacgatattccgttcagatttaccgtccagtacttcctgtacatctgacaggttatatattaccccgtctattttacaataatatttgtttttacccatatccttttctaaaatcctctattagtattaatgtatattaacaatacccttaagtctgtcctttggatgaaattatttttttatcaattcatccaagacttaccacattttttacaactccatcgctttacatagacaccattatccgcatctatagtatcataccatttaatagtatctgtacttccacaccttgggcaacggggcttcggcgggcttttgggcattctagcctgattatattcctgccaccttcttaatgcctcattataatcggatggtatctcattattattaaaccttaatacgctctcaaatgtatttgcactcactatatccatcccgtgttcttcatacattatcaagacgatattccgttcagatttaccgtccagtacttcctgtacatctgacagattatgtactactccgtctatcttacagtaatatttgttttttcccatttacttctccctttgtaaccctctatttgcattaaagtatattaacatttcccataaacacgtaactactcttgatgatatacaaacatttgttatttgggagtataaaatgaattattgcatctataaacatactcaaaaattcctgatgagttctccattctcttctttacatccacactcccacaccttgggcaacggggcttttgggattcaatttctctttgcttctgttctttttcttgttttatctgttctttttcttgttttttctgtgcttctctgttctcaaatgcagttaaattaaagtttccaagaaactgttccttcaagaaaagagcgtatggattaccccctttaattctcgccacctcatcttgtattctggggtctcgcctgcgtaccatatcctgatattctcgttcgctgattcccatgctatccatgactttctctggaactccttccaaagactcattatataggatcgcaaactctcgtataccatatcctgtctgcaccattggtatattacagtattcacatttgatttttactgcacccattaatccatttccctcttgaccacatctggtgcataaaatttttttcttcagatcatctatgccattttcctgtaagtattgctgcaacaggataccgcaatgagggcattctacttcatatgaatgtatctttctttggcactctggacagattatatctggcatatctgtattcccccttgttataatagatttggtactctaattattagatttaaggaattcgttaatacatgtcaattagatagcaactcctataccattttacatatataaacaggttttttatttcagaactaccaccatgtataaccacagtggttacatgcactatgcgcagaccatggacgatgtccacgtatatttgtgctcccacaccttggacaacagggcttcggttggctttttggtaaactggcttgattatattcttgcattctctttaatgcttcattataatctgtcggtatctcattattattaaatgtgattactgaatccaacatcgtatttgttggcaaatgatattcttccactgctgctatatagattcttgctatatccgggtgttctggattttcttctattatgtcctggatttttttgaggttatatatctttccatcaattttgcagtaatatttgttttttcccatatccttttctataatcctctatttgtattaaggtatattaacattacccttagcacggaactacgcctgttgctatactatcgtttgtcatttgaaatataaaataaattatagtaattattacatctataaacatactcaagtgatacctgattttctggaagtaaaaagtgttaattataccaaccgtcagtatagttgaaacctttctgctatatttacgtctgtcatttggaagaaatcattttttatcaattcatccaagacttaccacattttttacatctccatcgctttagatagataccattgtccgcatctatagtatcgtaccatttaacgatatctgtgctcccacaccttggacaacgaggcttcggttggctttttggtaaactggcttgattatattcttgcattctctttaatgcttcattataatctgccggtatctcattattattaaatgtgattactgaatccaacatcgtatttgttggcaaatgatattcttccactgctgctatatagatttttgctatatccgggtgttctggattttcatctattatgtcctggatttttttgaggttatatatccttccatctattttgcagtaatatttgttttttcccatttacttttcctcctaatatatttcattcctcaaaacactatccaatacatacctcctgtacaactgacaaattgtgtactattacttaaactcaacaaaagaaatgtgaattttcatctgagtcttttgaatgtattcaaacaattgtggcatatataatatttttcatataaacctatatctgaatttacgactctatgattttgtcttatatctgtactcccacaccttgggcaacggggcttcggcgggctcttgggtaaactggcttgattatattcttgcattctctttaatgcttcattataatctgccggtatctcgttattattaaatgtgattactgaatccagcatcgtatttgttggcagatgatattcctccactgctgctatataaatctttgctatatctgggtgttccgggttttcatctattatatcctggatttttttaagattatatatctttccatcaattttgcagtaatatctattcttactcataatagactcctttttattttattatatcaacggacaaatagaatgacaactctttgcttccgttacacttgtcactgagtcaaataggagctcttagtaaagatgttagcagtataggggattttacatccagacttgatatattaaaaaatctcggcacatcaggtgcagacagttttaataatatcagtaattcacttaaaaacatgtctgctgacgccgccgtagataaacttaataaattaaacttaaacccacagctctcaaaggaaatcctggataatgccaacaatgcaaaaatactaaatgctaccgctgaagaagtttcttcttctatggaaaatctgggtgccaatggaacgaaaggattatcaaccctggattccgggatttcaaatatcggtaatacgctgatgggacttatgcagtccccgctcggtattgcagctgttgttgccggtggtactatggctatttttgcagtaattgatcattttacaaccaactacagcgaagcacttcaggaggcgcaggatgctgcccaaaaatttactaataccaaagcagatttatcatcactgaataatgaataccagactaatcttgaacgtattcagcaattgcaggcgttaaagaactctggtgcaatctcaagttcagaaaacactgaacttgccaatctgctttcacaaaacgaagctctgcaaactcagataaatgcaaaagagaaattacttgaaattgaacaacaggatgttaacaaaactgctaagaagtctttacagaaagcggatataagccttgccggtctgtatgatgatgatggcaaaaagtacgaaaagggttctaaatcttatgacatgcattctgaatctatgaccgatgcagacgctatacaggccagtattgacaaggtagataaatttcaagacaaaattgacaaactgaaaacaaagcagcaaaatacaaaatctaaaagtaaatttaaggaatatcaagaagatatagaccagtatcaatctgcaatcaatgacctggaaaaagatatgggtacacgtgccaataacatcagcagtaatattgtaaatatgacagacaaatcttctaaagcttataaagatgctcaaaatgcattaaataattataacacacgtggaatgagcggggaggaaaagtcatccaaatcaattgaaagtttccttaattcaaaaccatctggtacccttgattcttattttacagatttagcaaaagcaaaaaaattaacaaaagattcctttacagatctgggactggacgcagacagtttcggtgtagacaatttatctgttgtaatagattactttaataacctggcaaatgccgctgataatgcggctggttctgtggaaaaagtagatggttctttctccggtatttctgaagcctttcaatcagaaaatgctggggatgcttatgagcagtcaggaaactatcttttaaaagcaaaggaattgtttgacaaaggtctcgtcaatacagatgatgttaaatcggtaggtaaaatgataggggcagaccctgataatatacaaggcacatttgcagaaaagtatcaacaggccaagaaatacttcactttcgatgataacggaactatgaatgaagatggcgtcttagcttttatggatgattataaggcaaaattggaaaatgttaacggctcgttcaaaaccactgcagaagctgccaaggaaatgaatttgacaacagaggcatttgaaattcttatgggacgcgcccaagatcataatttagattttggtgatatggttaagtcttcagaacagctagaatccgcaaagaaggctttggaaggtttgaaagaaatctacaaagatcaggatgcgcccgaaggaatgaaagacaaaatagcggggtgggaaaaagatcttgcaaatgttgatctatcgcatttagaccctactattgtggctaaaatcgaatttgcttatgacctggcctctctgcagcagaaaattgatgaagcacaggcaattgctgaaaatggaggagactccagtgactgggctgcacttttagctgcaaagcagacctaccgttccactgcggaagaggcgctcggctttaacaaagagggctttattgctcctgtacaatatgaaatggctggaagtgccatatcactccttcaagggcagatgaatggtgcaagtgaaggtgaaaagctcaaaattcaagctgagatagataacttgactgatatgcaaaatgaacttttaaaggcgttcaatgagtccgaattttcaatgaatctggatacagacagcacagccagtgaatggcaggctgcttttaattcttttattgaagaagggggaggcgaaggcattctggataatatggatctttccattgaatcagccagggaaaagcttgcggaattaacagatatggatgccgatgagattacgattccttttaacctggatacagttgacgcagatgccagcatggagtcaattctctcacaaataacaggtatacccgaagaaactgtagctgaatttatcgctaatgatgaaatcagccctgaagccatgaatgtgctctctaatatcagtggtatacctgtagaaaccttgactgacatgcaggcttccgatggtgcaaccggtgtcatagcacaagtactctcaaagctatacgggattcccccgtccaagctatcacggctgttggcccaggataatgcaagtggaattgctaatctagtcaattcagctgttaacggcatctcaccaactcataaaacagatgtgacagcgacggataatgccacaagtactctttcttcgataaaaacttctcttatgtcaatacccgctgttaaaagtattactgtagctgtctcaaaaattggcaagggaattaaagacttctttttcggcggaggcggagctgatggtaccgcacatgtacaaggcaccgcccactcccgcggcaccgccctctggcagtaccgcacctccggcacccacgcctacggaagcggaagctgggggcttccccacagcgaacgcgccctgatcaacgagctgggcagtgagatcattgtccggggcggcagatggtttacgctgaacaacggttatcctaccatggccaacttaagggccggggatatcgtcttcaaccacaagcagtcggaggctctgctgagccgcggctatgttaccggttctcatgcgcgcctcgtgggcagttctttcgctgaaggcagccttgggcatctatccggacgggcatatgcaagcggcacagagttcaagcaggaatttgaccagcttgagatacttatcgaccgaatggaatccgcatttaagaggatttccgattcggttgagacactctcctacaatctcaccgcacagaaccggcagatggacagcgccatcgccaaggcaaaaagcaatctctccgtctaccagaaggcatatgacacttacatgagcaaggccaatgccgtcggcctgtccggctcatgggtaaatgcggtgcagaacggaagttatgacgtcagcaatatcacagatgaaaacttaaaggacaaaatcgacgattataagaaatactatgaaaaggcgctcggactgcagaaagacattgccgatttgcagaaagacctcgtcgaccttgccatgaagaaattgagcaacattgacaactacttcagcaaccggtttgactacaacgacgatttcggttataccaatcagatttccgagctcaactcggcgctctcccagtatcagaacgagcttgcgaagcaggtatcctccggcacgatcaagcagtattcggacgaatggtatgacgcccagaaaaagatcgccgactatacccagaagatactggacgcaacatggaagaagtttgaggataccctcgaccacatggacagggtcagcgataatctgaaagattttctcagtcttaaggaagccaaaggcgaacctttgaccgaggcggattatcagaaacagattgatttaaacaatgcttccatacaaaaaagctatgatctgagacagcagctcgtgaaaaagcaggccgtctatgacgtaggctccaagctgtacgacagtcttgccaaagagatcgccgggctggattctgacatttacgacttgatggagaacaatgagaagctgaagaaatccatctgggagacccggtttaccaatccgttcgaggaagtcatcgacggcctggacgcgacgatctccagttcaaagaacctccgctctctcctcgataaggattccttctttgatgagagcggcgccctcacagacaacggtcttgccaatctggcgctgctcggccaggagatggccgcgtccaagcagaaggttgccgaatacacggcggcgctcaagaagctggatgaagcgtaccagaacggcattctgagtcaggaagactatgacaagagccagaaaaacatgctcaaggatattcaggacgccgccggggatgtgcaggactacaaagataagatcattgacttgtacaaagaccagatgaaggctgagatcgactacatggacgattactatgacaaacggcagaaagcgctggatctggacaagaaatattatgacttttccaagaagatgaacgcccagacaaagtctgtcaatcagctgaaagcccagatatctgcactccagggcgttagcaatgcatcggcccaggcagaactgcggcggctcgaacaggaacttgccgagaaggaagaagacctctccgagcttaagaaagaccacgcagatgacatgatcgaccgcggatacgacaaactgtcctccggattaaaggacagtctcaactccacaatggatgagctgacccacaatgcagatatgcaggaacaggtcgtggccgacatgctcggcaaagtcgtggccatgtacggccaggcatatggcaagatcaatgagatcattgccaatacaggatttgcaggaagttccggctttaaccagaacatcaccaaccttggcacccaggccggcgccgctggccaggcagccgcaggaagcgccgcgcagggcagtatccaggcttccggcgccgtctcagacgtgaacaccggcgcgatcaaccagaatccatcccacggcgccatcctagacgagatcagtaaagagacggatatcaacaaccggcctgtggctgaactgaccttaagcacctcttctctttcgctcaatgaaggaaaatctgccgtcgtcaccgccaggatccgcccaacagacgcggccaataagacgctgcgctggacttcatccaacacgaaagctgccaccgtaagcggcggcaccatcaaaggcgtaaaggccggaagtgcagtcatcacctgctccacgaccgacggaagcggcctctccgcctctgtatccgtatctgtcacaccggctccggcaaagccggcaccgtctcagaatgccccgtcttatggcggaattccgttccgttataaaaaggactactatccgaagaataagctgaatgtcaacagctccatcgttgaccggctgaagtcccacgacttcgattcttccatgtctgcctgccgggagctttacaactactggggcggcggcggatattactccggcacctactcccagaacgtctggctgctgaacaagatgcgctccgccggttaccggagggggacccgctccgttccgataagcggaccggatttcatacacgacggcgagctcgtcatccgcaagtccgacggcggcatcctcgtcccccttcagcgcggcgacggggtcatcccttccggactcaccgagaacttgtgggacctggcagagagagcgccccaactcctctccgacgccggtctgtatctcccgcttccggccgcggcaacgcatgcgtcaagggaacataccgtgaatgcacaattcaacttcggcaccctgctcaatatagaggggaacgccgacaaggatatcgtggacgaattgaagtctgcgctgccggctcttgggaaagaactgacaaagatagtatcatccgaattatctgacgattaccgtaaattgaagtaaattttgaaaggggtcagacccctggcgcagccggggtctgacccctatgaaaaaaggaggaattgtatggcaaaatcatttaatgatttcatattttcagacaaaaggctgtccgacctggacagtcattatattgcggttgattttgaccaggacccggatccgtcttttgccttcgcaaaggatatcgagtacggggacaccaaccgctaccgcagtgaacctggttctgtgcgggccagacccggcgataagttaaagttcgagctccatatcatcaaagacccggacgcatatccggcccaggccgaccggatcatcacccctgccgatatcagagagctggcccggtggcttacctccaccgtatcttctgaattactggcctttgaatatggcagcggacaggaggatgcgtcccggtttttctacggacagttctccgacatccagtccttccatgtggccggcgatgtatatggcctgcggcttatgttcgactgttcctccccttacgggtatacagacgacatcgtccacaccgccgcctgcacaggcgaaacggtcagttatacgatcacaagccatgacgaccggctggatgagtattgttatccggtcatacgcatggcctccgcggtcaccggacaggcttatttcctgaatctctcggactgctgtatctacgaccaggggacgctcgttcccgcagcgtcaaatgcccggctcatggaacagttgcaggagaaggtgtctgcttacggcctcgcccacggctatgcgccggaattccagctgacggaggacgggcagcatatcgtgaccgccggtaatgacacagccgtctgctttctctatcgggacgtgtacgggcaggaacataaatgtattgcatgctatgtagcatctacatatgaatactacattgtacggggcggctttctctgctttgacctgtaccgggagcttcctgttacgatcgacgggaacagcctgtttatttttgacgatatcggccgtatggtgaagctgtccgaccttggcgtcacggacaccgactatatgtactggccaaggctcgtaaacggcgaaaatacgctcctgttctgggcggaggactgcaccttcaccatcacctacagagagacccggaaggcaggtgcgtaactatgaatataaagttcaacaacaatcggcaggcagacccgcctcatttttatctcggaacaccggatcacgaactgctctgcccgctcaacggcatacgcgccgattccgtaaatcttacgctcagtctgaacgatacgtcagagctttcctttacctgtgacaaattcatttccgcgcccgggcaaaagaaaagcgggcaggtcatgtcctccggatacgacctgctcaacgacttcatgtgtatctatgtggagcgtatcgggtggttcatcatgtcagccccgcaggtgtccaatgacggagatgaggaatacaaaaaggtatccgcacagtccgcagagatcggtctgacgaacaacgacctgctcggctttaaagtgaactgtggaacaacggactccattgaaatgttccctcccgacaatgtggaatacatcggcgacgtcccatttgcaaaaaaacaggtgaccttctgcaacaaggagcagccggaacttagcctgcttcacatggcgctctcatttgccggcatcgaaggatggagcatcggctatatcgacgagactccaaaggtataccgctcttataaggacggacagcttgtggaaaaggtcgtacagctcaaagatgagatcggcacctttgacatagattctaaaagtgtctattcctttctcacacaggacgtcgaacaattttttgaatgcctgatcctttttgacaccgaacatatgaccatcaatgcctgccgcccggagaatcttggtaaagacacaaacgtgaccatcggtttccgtaatctccagaattccaatgatatctcggtggataagaacagcatttacacccgctaccgcgtagaaggcgacgataagctcggcattgaatacgtgaatttcggcagcaatatgatcgagaatctctcctcttttctcaacgaaaactatatgagtgagactcttataagcaaatataacgcatggctgtcagataccgaatcgaagagatatgaatacatggaactgagccgccgctacaacagccagctcaacgttatgtcggaactgatggaccgtcttcctctggacgactgctccacagaatggaacaagttcagcgacgataatctccgcaaggcgaaagacaattacgaagcacagctcaagggctatgagacttactacacagatgaaaacggtgactttgacgaggagaagcttcaaaattccccggatgccaatgactactatcagatacgcgacgtcatactgccaagcatcgccattgaaatcgcaaaccgcgagctgcccacctcagagggtgaactgccctatatcgactcttacaagacagactggaaattatacggtatcgatgaactgctcgtcaatatcgatttctaccagtcgcagaagaagtctcttgaggacgcgcactacgacatcccgtatacggattacgaacagaactccggggacgacgaagagaattacccgccgcacacgagagacatgcacgaggaaatgtattcgcagtatctggatgtcgtcatgcagctggacgaaacggtctccggctcctgtgccaatgccctcgccgaacgcacggaggagtacgaggcggcggaagcggcggcagagaccgtgcagcagcagcggacgcttcttgcggcttccgtggataagaagaactggaaggcagacggcgccgagccgtttacccggaaagagctgcgcacactctcccgcctttacagggatacggattacacgaacaacaatatgttcctcaccagctccgacgaccaggtgacggccatcgacgagcaacttaagctgtacgacgccgcggtagaggacctggagatatccagccagccgcagtacatctattccacagaccttgagaactttctctccatgtacagatacaagcagtacactgatcatctggagcttggcgacttcctctatctcggcacgcaggacgattacgtcgtcaagctgcggctcatttccctgagctataaccccctctccatggacaacgacctgcgcatcgaattttccaatatggtaaaaacaggctccaggcgttacgatacaacctacctcctcggactcgggggaaatacatccaagaaccgtatctccggttctgcaggaggttcaggcaaaaatgaaggggtcacgctcacagcgggccttatacagaagatcctttcatccacggtattcaacaataaagtgaccaatgccatcaaccagcatttccaggcgctcaccggacagatgatcgtcgcaaagaatctggaggccgagatgatacgcgtctcagatatccgtgcggaaaacggatttttccagtatctgcagtcgcagctcattgccgccgataaaatcgtatctgacagcgccgtcataaagcagctcgacacactcgtcgccaatataagaaatgccattgtcggcagttcctccacggagaccggcattgtcgtcaatctctccgcggacaacgccaggatcgaggaggcctttttaaaagatgtggtcgcccggtatatttccgtaaatgacttgaaggccggaacgatcaacacggacgagataaatattctctccgaggacggctctctgtccgtcatcggcaatacccagacctttaaagataaaaatggaaatgtacggcttcagctcggagaggacgcagaaggcggcttcagctttatcgtgtacgacacttccggcaccggcgttatcatggaccagaacggaatccgggaatctgccgtctcggacggtttgatcaaaaataatatgatagccccctccacggtaggcaaagataagatcaactggaaggaggcgggcgccgtccttgacaaggacggtaatccggtatggaactccgctcagatcaccttgaacggacaggggcttgacatacagtttgcttctgtcattgacgacatctcccggctcggtacgacgatggaaggtgtagagacctcactggacgcggtggagaagtccattaccgacaaggtatggcggacggatatggtggagatcaccgacgagaccggcagcacagtcagcaagtccatcgtggacctgctcgtccagcataatataagcttaagcggcatcacagacacggtaaaggaaatacagtctgacaccggtacactgacagaacggttcaccaaggccgagcaggatgcctcttccttccgccagaccgtcacagagacatacgccacaaaagaacaggtcaataccgcccagtcggagcttacacagcgggccggtgaaatcgaggcgtccgtaacggatctgagcggtaatgtcagcacactcaccacagatatgaccgggatcacacagagagtacaggacgcggaaaaaaatatcacctccgtaaaggcggccgcagacggagtacagaccgagatcaccaacgcaaaaggtgacaaggctaccttgaaggagaaaatagacggtatctctgcatctgtagagaccgtggacggcaagatcgcggaagtggaacttacggccgacagactgtcgtcaaccgtagcgcggaaacaggacgctcctcccaccgccatccgctacatccgggactggctgaatggcaattccgtaaacgccctgaaccactgggtggaatgccaggtgctgacggacagctccaatatcgcgttcagcctcactcccgaggcatatgaccagaacggcaaccatatagaggccgacaacctgaagacatataccgacgatattcttataacatttgatgaaaatgagaacccggtgagcagctcttacattacggctgactccggtaaaaaatgtatgcagcttgacctgggcgaggtatatacagatatcgacaaaatcacagtctggcactattatctggacggcaggatctacaatcataagctggaagtatcggcagacggacacgattggcacacgctttacgacagcgatttttccggcggatatgcggagaaagaggaaggacgtgtctactatatctccgacaataccgttgactccaagctttccagcataacccagaatatagacaagataagtctggccgtggaaggcacaggcgattctctcggtaatctgtcagataacatggagtctctctccgatgacatccggaaaaataagtccgagatacaggtggcgttggagggcatcttgaacagggtcacttccgtagaaggaaagaccgcagagacagaactgaccgccaacggctggaaagcgctgttcgcgcagataggcatgtatgattaccctgatatcgtcacgaacgtgctcatgtcagtcaacggcctggaggtctccaatccggatacgggaatgaagactgtcatgacaacagaagaatttgccggctactacaataacgacgaaatgttccggctggaaaaggacttgacaaaaacggagcgtatagaagtgcgcaacggtatcgatacgaccgccatcaaaatggtcccgaaaacatatacgatcgacggcgtgacctttaacgctctgcccttcgtcaaatccggcggcacaagttaattatcatccgaaggaggcgtctgcggacgtcttcttcacaattagaaaggagaaactaaaatatggcaagtggttcatggaacttcagtacaaacaatcaatatatcaccggccgcatacgctggtcttccacctcaaacggctctaaagcaaatacttccaccgtgaccgcatatctggactatatgaaatcatccagctcaactgcggcgacatacggtacattcaacggtgcgatcagtataaacggctcatccggagccgtctccaaatatatcaccttaagcgccaacaacagctgggtcaatgtagggagccgggcagtcacagtcggccacaataacgacggaagcaaatccactaccatcgctgcaagcggcggtatcagcggcacttccttcagcagctccagcacctccaaaagcgtagccctcgacaagatcccccgttacgcaaacatcacaacctggaagaatacggcagtgacacagacgagcgccaccttccagtggggcgcagacgcctcctgcagcgcggtctactatatgataggaaatggctcgtgggccgcaacgtccggctccactttcacgataaacaatctggcgcccaacacttcctactccgtaaagctgaaggtaagacgttctgactccggccttgagacgacgtccggcgctatcacagtaaagaccaaaccaatcgcatccatctccaacagcagcctcagctttgacataggcggggatctggaactgacgctcgccaactacgctctgaatgcatccacattcaaattcaatgttgagcgcgacgacggcacatggacaaccagcctgctcgaagccagctcagatcaaaacattcccggtattacacttcccctctccggcataactgacactctatacagctgctgcacgacgaaaaatgaggtgaactttaaaatatcgtgcggcacgacaataaacggcaccttttatgaaaacatttcttatggtacagcccgcgtcacagacagtgatccggtctttaccgattactcgcacggcaacaccgataccgccacatcctccgttctgcaaaatgcagcttacctcatccagaattacggaaacatgcaggctcagatatctgccgccaaccgggcggttccgaaaaaccatgccgccgtaaccgaatacatagtcgaagtcacggattcaaaagacgaagtcaaaaagcagctcaatgctgaatattcagacagcgaaatgctcataaacctgggcacactgtccgaacccggggactataacatcaagatctatgcccgggattccagaggcaacatctccggcaccgtcacaaagacattccacgttctgccgtacagccggcctgcatcaaaggttactctggcaagaatcaatgaatttgaaaaagaaataaccattgatttttcatctgtatactccaggcttaaaatcggaactgccagcaaaaacaatgcattcaccgtaaagtaccgctatgcagaagtcgggacatcatatgaaagcacttataccacgatcacagggataaccagcgcagacatccccggctcccccaacgaacttaaggccacctacctaaaagactccggggacgacccgtttatcacactggatattgaaaaatcatataactttgagtttgtagtctccgacagaatcacaacaacgacagaaactacgatggtcgacaagggaatacctatctttatgccttgcgacaacggaaaagtcactgtcggcatgctgccggattttgacagcagcgcggattttcaggttgggacggatattatggctacagattcagacgggacacagcggctgatcctggatgagattgataaaacaaatgcgaatttgtctttgacaaatataggccttgcaaatataaatgattatgtgattgatgcatatactgaaaacggttggatagcgagaaagtggaaaagtggatttgcagaatgctttgggctggtttctacatctgcaacacactacagcggtcctcatgcatcatttttctatggttactatgtagattttaaattacctgtaaacttatttgatagtgcgccaaaacaagcatactcagttgcgataggcaccgggtttgcgatgccagcgcaaagtatgtttggctcagacaagaataaagtgagattctatgctttggcgaatttaaatggaactcaaatagtgaaaatcagcgcacacctttggggtacttggaaataatagtatataaaaagtatagtggtatgctttcttcactttatatcagattatttccaggaacctttagcagtccagctaaaataaatattccaattaccatttgatttattgcacccgcagactgtgctggaggaggtccgtattaaatttccgccttcatttccttcataaacttttgtggcaacatttccattttgtccgagtgacagtgaaaaataatatgacgtgttgttaaatgaaatcgggaaatttaccgttttaatctgaacggtatttgtcgtagcggtaaaatttgtgcgtccccacatttccaaaagtccattattatattttttataacttccgttagtgttgctaccatatacaaagccaaaattattgctaagcatattgtacttgtcagtgcagtctgtacttgtaactgacaaattcgcatttgtaacacgaatcttccaaccataaattcttcttcaatcaataacttttaccgaaaggaatggtgcaatgaatatattaaagtaccttatggggatcagtcctccccttactttctcctcctttttcatatatctgctcgggctgatttttttatgtaaagaactttttttagccgcagactggcttttgaattattttggaatcacttcaaggagagtgatcaaacgagaacaggacagaaaacaaatatccaatattaattaccgtctggatgcacaggcagaaaatattgtcaagctctgtgccgcgaaccgggtcattctgtctgacagaatcaatcagaaatataaagtctatctcagcaaaggctatatcccggaagacgaatatgaggaatttgtaacactccacaaagtatataacgaaattggtggtaatcataccggggatgagaaattcagaaaatgtatcaaacagcttccgatcaagccggaagacacacagaccaacacatataaggagtgataacatgaacataaatattaaagaaaccaacttatccttcggctcactgagccggaggagcactacaacgcgtattatactacatcacgccgaggcttcctcctgcgatgcgtcagtcatccataaatggcataaagccaatggctgggccggtatcggctaccattttgtcgtgagaaagaatggtcttatcgagagaggccggcccgaatgggcagtcggcgcccatgcatccggcagtaattccaattctctgggcgtctgttttgaaggcgcttatatgaaagaggcaatgccggccgcacaaaaaaatgccggcaaagacctggttgcatacctcaaaagaaagtatggcattacgaaagttcagagacacagtgacgtttgtgcaacttcatgtcccggtataaatttcccgttttcggaaatcgcgggtgcgtctgtctccggtactgtcactgtttcctctgccgggcaaagcgcggagcaaaattccagttcctcctggatatcccgcctgcagagtgaatgcaaccgccaggggttcagccgccaggcggtggacggaatctccggaccaaatacgctcgccggctgtccgatgctctctccgggggcgtccgggggtatcacaaagcttttgcaggaaaagttgatctctctcggatattcctgtggttcctccggagctgacggaatactcggaccagacacacagcgggccgttaaagcataccagaaagaccacgggctcaccgcagacggcattgtcggccctgcaacatggagaaagctgctgaatctttaatggggacagaacccaaccgtcttttggggacaggccccggcagctatttactctgcaaaactgatgacttttttatgagtatatgctattattgattctaaataatttcacactatgggccggaaaccgggttgcagcttcccggctctttcaatttcccggcggcaatctccgctttgacggagacagcggaaccggagcagatttaaggatggtataaaagtatgaagcgtattttcttagttgaagatgatctgagtttgatcaatggtttatcttttgccctcaaaaagcagggatacgaaacagatattgcccgtacgagcgttgaggcgcagaatctgtggggaaatgaggactatgatctagttatcttagatgtgtcgctccccgacggctctggttatgaactatgtaaaataatccgcagaacatcgaaagtccccatcatattcctgacggcggcagatgaagaaacggatattataatggggcttgatatcggcggcgacgattacatcactaagccttttaagttagctatacttctctcccggataaatgccctcctccgcagaagtgataattttaatgagactactacagaactgaattctaacggtatcaaagtaaagcttctgaagggagaagtctataagaatgaatcacaacttgacttaacagcaagcgagtataaattactctgtttatttatggaaaacccggacattgttctctccccggaacagatactgagtaagctctgggattgtgacgaaaaatatatagacagcagcacccttactgtatatatccggagacttcgcacaaaaatcgaagacacccccggacagccgcagaaaatactgacggtacggggtatgggatataaatggaatgctgctgatcgaggtgcgctatgaaaatactcgtaaatagaaaggtcaaactactcttctgccttgtaatattgtccataattctgtcttctctgctctctattgtctttataagactgaacccggaacatgcagcgttatatgtactggcgtcttttctgtgcgcagggattcttatattggcagttacgtatctgtattttaaggaacagaacagtattatggaaaatgctgtagagcagatcaaagaatatatttcgggaaatcaaaacgcgcgcatcgagtgtgacgatgaaggcgaactatacaggctgttccatgaagtgaattctttagtctccattttgaacgctcacgccgaaaacgaggaaaaggctaaaaagtttttaaaagacaccatatcggatatctcccaccagctaaaaactccccttgccgctctcagtgtttataatggcattatgcaggaagaagcaaaggatctgccggctgtgagggaatttactgtcctttccgaacaggaactggaccgtattgaaatactcgtgcagaacctcctgaaaataacgaagcttgacgcggggacgatcgtgatagaaaaaacggatgaaaatatgtcggaaatgatgggcagcatagaaagacactttttgtatcgtgccggacaggaggggaaaaacttctgtctttgcggcgatgatacagtcatgctgtcgtgtgaccgcagctggatgcttgaagcgctcagcaacattgtcaaaaatgcttttgaccatacggaacaaggtgatactgtctcgatcgaatggaagcagtttgcttccgctgtacagatcacggttaaagataacggaagcggtatccacccggaggatctatactatattttcaaaagattttaccgcagccgtttttcaaaagacagacagggccttggacttggactttcacttgcaaaggctgtcattgaagcacatggagggacgatagaagttgacagtgaacttggcgccggaacgacttttaccgtcagttttttaattcctacaaaattgtaggctgtatgtcatcttacagtagtgtgggcgtgataatctttctataccaacaaagaaagaggtgcttatttatggatctgttagaagttagatcgatctccaaaacttacggcagcggtgaggccgctgtccacgcgttaaaaaacgttaccttctctgtttcaaaaggggaattcgttgccatcgtcggcgagtccggctctgggaaaagtacacttttgaatatgataggtgcgctcgataccccaacccacggcaggatatttattgacagcaaagatacttttgcaatgaaagaaagcagcttgacagtcttccggcgcagaaatattggatttatttttcaaaactttaacctgatacctgagctctctgtcgagcagaacatcgtatttcctctgttgcttgattatcagaaaccgcgtaaaaaacagctggaagaattactctcggtattaaatctgaaagaacggcgccaccacctgcccagccaattatccggcggacagcagcagcgtgtggcgataggccgcgcgctcatcacaaggccggcgcttatcctcgcagatgagccgacggggaatctggacagtcaaaacagccgtgaagtaattgcgctgctaaaagaagcggcaaagaactatgaacagacgatcataatgatcactcacagccggagtattgcgcagacagccgaccggatactgcaggtatacgacggtgtactgaccgaccttgggaggtgccgcgaatgaaaagctatctcagcctgatccccatttccgccaaggtccacagacggcaaaaccggatgacattgttatgtatcatcttcgccgtatttttggtaacagctgttttcagtatggcagagatgggcgttagaatggaacagacaagactgatggataaacatgataatctttcgcttcatgacttggccggcagcgcaatgggacagtctctctatctcatagccgcggtattattcgtgctcatcctgacggcgggtgttctgatgatctcaagcagtataaacaccaatgtagcacaaaggactaacttttttggaatgatgcgctgtatcggaatgagcaagcggcaaattgtacgttttgtaaggctggaagcgcttaactggtgcaagatcgcggttcccgcaggcgttgtactgggaatgatgaccacatggggattgtgcgccgcgctgcggctccttgtgggcggggaattttcccatatccccctctttggcatcagcataaccggcattgccggcggaattgccgtgggcattgttacggtattgatcgctgcaagatccccggcaaaacgggcggcaaaagtatctcctgctgcagcagtctcaggaaatacagaaagtacgggaaatgtacgcaatgcagtcaatacacgtgttggaaggatcgagacggcccttggcgtccaccacgcagtatcggcaaagaaaaacctcatacttatgaccggctcctttgctctcagcattattctctttttatgtttctccgttctgatagattttatcggataccttatgcctcagtcctccgccacttctgatatcaatatatcaagtgagagcagttcacgcttgatagacagcagacttataggcagatttaaaggtatggaaggtgtaaaacaagtatatggccgaagaagcagctttgatgttccggcaaaaataaataacggtaagatacgttccaataagatcgatattatttcttatgatgattttgatctggattgccttacaaaagatgatgtgctgaaaaaaggcagtgatatttctaaagtgtacggaaacagcaattatgtacttgccacctgggacaaagacagtcccctgaaaattggcgataagatacagacaggcggtgaacagctggagatcgccggtttcttaaactacgatccttttagcagcgacggcactacaaacgggaaaataacgatcatcacttccggagatacttatatacggcttaccggagtatcggattattcgcttgttatgatacagacaacaaacgatgcaaccgataaagatgtggaagcgatccggcaggcggcgggcagcggttacacattcagcgacaggcgcagtgagcgcacgacaggcacatatatggcatttgtcttctgtgtctatggttttctggcgatcatcgcactggtcacggtcttgaatatcatcaacagcatttccatgagtgtgtctgcgagaataaagcaatacggagccatgcgggccgttggaatggatgagcgccagatcacaaaaatgatagctgccgaagcgtttacttatgccctgtccggctgtattgtcgggtgtacagccggtctgctgctcagtaaactgctgtatgacactctcattgacgctcatttcagctacgctgtatggaatgtgcctgtcacacttctgctcatgatacttttgtttgtctttcttgcagcttttgctgcaatttatgccccggcaaaacggataaggaacatctccgtaacagaaaccattaatgaattatagacaggcatattgtctcatgcctgcaaaacggcggctttcgcttctaagccgccgttttatcattctgccgcccgctttcttatccggcctccatcagcactcttgccagcctggcatcgcggtcttcccggtaatatatatcatagcgttccagcagatcatcctgatagcatctgatctccgtacttgtccgcacgatctccagcaggcgccgcctgtttatcagctctgcgtcccctgtatctatttccatatctgcaatgcacaaaggcctgcattgacctaccatatcgacaaatgtctttgatgaaacgaccttatacataccatcctccacaatgaaaagagcgcggttctatatctggtttaaatatgactggaaggaacggataaattttctcatatccatattccatcctgagtcttcaaagtatctgccgtaagactgattctccctgactccttccttatccgtacccagcttcagactgcggatatctgtgccgtccgcaagaacctcgtaataaattctgttgaaatatccgctgcgctcaattgaagtttttgagatccgcttttccccaaggatcttcttcatttcttctaaaagatatacaaacttcctctgtactttggagtaggatacagtctcattgttccgtatcttccagaccgagtccggataaagcgaagagacgtaatggactgttttttcattcctgattttcttcacttctgctgtggcaagaagcattccggcaagttccggtgataagattctctctgtgccgtccggcagctgagtgagcccgccctgccttctgatatggctgctcctgagattgacaaggttataaaatcctttccctgagatcccttcataaatactggcaaatacggacgcaatatacactccgtagccggaatcgagcagacgctctaaatattgtgtgtacaactctgctgatatatagaactcctccttggccgccagaaaaatatccttcagttccctgttcggcacaaccttgacagagatccagttaaacgccgcatatccctttattacgcaccattccacgtaattggaaagctgccgcctcttgtcttcaaacgtccggtatccgtcataccggatgaggaagtgaagcagctctgacgtccccatctcacacagatcttgaccaagctcttcctcatatgctcccgaatcctggaacaaatgcctcaggtaatcctgcttcttatactccaaatactctttttttctttcttcattatacatagaccttacacctctatgtgacagcatagcatacaggaagaatcaacgtcaatttcatttcccaatgttattacaaaagacattatccccggcggcagagacatggacctctcctgccgtccgggggtaaaataggatgcgcgtctatgttctgtattttcattatagaacatatgttcccataagtcaattgtatataactcacaatatttgtccgcatgaaacgaaaccacggtaattactaagaaaaagataaggttttctttcgtccctctgattttttatatggtattataatactaacttttaaggaggccgctgttatgacaaaaagacgcttcattcccataatcgtacttggcttaacctttttccttcgctcaacttcatacgctgactcctcctggtattggatatccacgacgcgcccttacgatgtcctcccttatgtggcggcagtcacgcttgccgccgagactctggccgtcaactggatctgccgcatacaccgccctctgaaggttttccttgtcatgcttctgggcaacctcatttctttcagccttccctatataggggcttcttttgatcccgtgtttcatattttgggacatccctggcattccgttctgatgtacgcggagtctctgcctttttatacggtgggggcattctatctgctgctcaccattgccgcggaactgcctgttgagtactgcatgctccgaagatccgcgccggattccagaagactgctgtatacgattgtcggcgccaataccgcaaccaccatatttgtggctgtaacagagcgtcttttctgccgcgggcactggtgatccagccgctttgacaccggatcagatcttatttaccgcagcgctcagatattcgttgctcacttcggcaaatttctcattttccactgcctcggcaagttctgcgtctacaggcatcttgccgagcaccggaatgtcaagctccgccgctatctcatcaatatggctctcgccgaacacggagattttctttccacagtccggacaggtcagataactgtaattctcaacgatcccaagtaccggaatgttcatctggcgcgccatgttataagccttcttcacgatcatctgcaccagatcctgcggtgacgtgacgatcaccaccccgttcaccggcagtgactgaaataccgtgagcggcacatcgcctgttcccggcggcatatctacgaagagataatccagttctccccacatgacgtcagaccagaactgcgtcacaacacctgcgatgacggggcctctccatataaccggatcagattcattttccagcaggagattgacggacatgatcctcgtgccgtcttttgcttcgcacggaaacataccttcatcacttcccttggcactctcgtgtaatccgtacatctttgggatcgacgggccggtgatatccgcgtccaggattcccactgagaagccctgctctctcatcatccttgccagagaggcagtcaccatggacttccccacacctcccttgccgctcactacggcgatgaccttcttaacgtgtgaaaatggatttgccggcgcgcttagatcctgcggtttgctgctgcaggaatctgcatgcgcgcagccggcacagtctgacggcgcgcagccgttttgttgttctgccataatatatttccttctttccatatttgatttggggtcagacccctcttgcgaaaggggtctgaccccattcgtaaaaccccatccgcacatgataatggggacagacctttccggggtcagtccccttttatgcttaactgtatctattcaactactgcaatcacttctacttcacagagcacatttttcggcagagtctttactgccacacagctccttgccggtttggatgtgaagtattttgcgtatacttcattgaatgccgcgaaatctcccatgtcggcaaggaaacatgttgtcttgatcacatggtcaaaatctgttccggctgcttttaacacttcgccgacatttttgcacacctgctctgtctggccttcgatcgtcgctgcttccacattgtctacttccgggttgataccgatctgtcctgcggagtagaacattccgttatgtacatacccctgtgaatatggtcctaatgcctttggtgccttttctgttgctactactttcataatttacctctcctttgcttcttctaatattttttgtgctatacatacgtcgaaaagccccattcccactgatttaaaatatgtggtcttttccgtatctgcagcttcctctgcttctgatgcaagataatcgctcatcagcacgatccggtcttttgtcaggcgtccttcctcgatcggctggctcaaatccccgcactcttcgcatgcgtaggggagctctatgtataccttatccacaaggtcccagactgcatccggaatttcccgcatcttgggcgtataggaaccgatggctatgatacacttgccccgcagcagttctctgtcgttgggcagcaccggttcagcagaaggtgtagtcgtacagattatatcgctcttggctgcaagctcttctactgtcttacattgtactacctttgtgcccgggttatcaatagctttttccaatctgtccatatattccgtcaggtcgcggtcactgtggttaaatacatatactgtatgaatgtcccgcgcggcacatgcgtaaacagcctggtggaagccctgcacccctgcgccgatgattccgactgtatggcagtcttttcgggacaggtgccgtatgcctacgccgcctactgccccggtcctccacgcagtgaccgactgaccgtccagcactgcctcgggcgcgcctgtcactgcattgttcagcagtatgatgccgtcgatagacggaaggccgagcctggcattatccggaaagatcgtcagcatctttgtaccgatgatctcttttgtataacagggcatatacataagcgtcttattgtcgtgctctaccgacggccggggcggcatataatactccccggagccgaaaatgcggtatgcctcctcgatctgatccatcatcttatccggatctgcaagcttttctatctcctctttgcttaagataatcatttcattaagctcctctcaattcttctttttctctagtgacatctttcagccacttataacttacgtacctctttaatgtcagcggaatctttatgagctcgtcgctcatgaggatcacatagacgacaggcacgctggcgtggaatacaaacgccgccactgctcctatgatgatggagcacccccacattgtggagacatccatgataagtccgaatttcgtatcaccgccggaacggaagatacctatgaccattgtgccgttcagtgactgggccactgtaaaatatgacatgacgaagaacataaacgtaagataacctttcgcctgtcctgtcagcgcaagactcgcattggcgagcggggctgcaatgaggatgacagctcctccggccgcaccgataatgacgctcagccagataaaccgtttcgcatacgctttcgcgtattccagcttccgctcaccgatcgtctttccaaggtagatagctgctgcatgggctatgccgaacacgaccaccgttgccagctgccgcgcgacctgcgccacggaatttgccgccaccgccgcgcttccgaggtgaccgataatggcagtattggccgaactgccaagcccccacatcacttcgtttaatacgaccggcatcgcgtatgtcatataatcccggaacagaactttgtctattcttatcagatcccggaagcgtattctcacaagcttattatgtacaaacgcatagagcagcactatgaccatctctgtgatacgcgcgatcaatgtcccgacagcggctccccgtatgcccatggccgggaagcccatcagtccgaatataagcagagcgtttaccgcgatattgacaagcagtgatatggagtacacgaaggtggcgatgagcacccgttctatgctgcgcataatattcaggtacacctgggtcactgccatgaacaggtaagagcttcctacgattctcagatattttaccccttccgctatgacttccgggtccgagctgtatatgtgcatcagctgctccgggatgaacagcgcggcggcggcaaacaggactgccgtcacgattccggcagagagccccattcccaatactttctcgatggtcctcgtatcctttttcccccaatactgggcggtcaggacggtagcccccgacgtgatccccatgaacagcagcgtcatgataaattgtatctgccccgcaagggaggctcctgagagcaccttttcccctaccttcccaagcatgataacgtccgccgcagtgacacctacgtttatcagattctgtatcgccatgggaattacgagcgcgaagacatttctgtaaaaactcttccagtttatattcagattatccgtggtttgcttctttatatatttcatacgcatcgtgcgcagtcagctctttgaagcttccaagccttatcgtatccccttttgtcgcgttctgtgaaagcttccggagcgtctcgtccgggaggacgcctgttttcagctccccgatacatgttgcgacatggagggagcgaaagaactcttccgtcttctctattgccgcaagcgcagcctcctcctcatctttattttctatgccccacaccgcatacccgtagtgggcaaatcttggcacatccagcctgtacacataccgcgcccagcttccccagaccgcggacagtgtggctccgtgcgtctcatcaaacatggcgctcagttcgtgtcccagcttatggtttgcaaaatctctcgggcggcccagtcctgtgatgccgttgtgtgacagacttccgcaccacatgatctcactcatggcatgataatccgtctggtccgcgtaagctttccgcccgtactcgatcaccgtccgcagaagtccttccgcgatctcatccgtcatacggttgccaggcaccggagtgaaataccgctccagcgtatgcatatagatatctacgataccacatgcaagctgatacttgggcagtgtatatgtaagctccggattcatgacggcaaacttcggccggttcaagtctgaactcaccccgcattttcttccggtctcttcgttcgtcagaacggaagaatcgctcatctcacttcctgctgccgatatcgtcagcaccgctccgaccggcatggaccgctccaccgtctgccttccttcccagaattcccatatatccgtctccggattggcagctccgatggcaacggccttggcggtgtcaatcacacttccgcctcccacggccagaatcagatccgccccgaggccggccgccttcctgacaccctcgcgcgccagactgacacgcgggttcggctgcactcctcccagctcgtcataccggataccttccgcttccaattccttctttatcgtatccagaagcccgcttttcacgacactgcccccgccgtacacgatcagcacacgcgccgcgccatatttcttcaccagtcttcctgtctcccgctccgcatctttgccgaacacaatttccgtcggcgtatattgaacaaaactatgcattttttatacctcctttatcaattgtcacctaaagacgattgtatcataacaaaaagaattctaccataggggacagggcaaatttaattggggacgggggaaatttaaatttcccccgtccccaattaaatttgacgtgtcccttactcttgttctttgcttttgcttaggacgagtcctacgcagaggatagccgcagcaaacagcagctggatgccgaatcctttataaatgacctctgactgtgcctttgtaaactctgtattcaccgacagcacgccgatgactttctcgtaccagtagagcggaagaaactgcgcgaacatcctaacacctttcccaaggacgtccagacttacaaacacgccgcaggtgaagcacattccaagggttatcacattgatgatcccgttcagcgccgcgatctcctgaacgaccactccgatcgtaaacgcgatggacagtccgacgagcacgcagaggaaggaatttatcatataatagatattgttcggatcgttcagaaactggcccgggtacatgaccagcggcagcagcatgcagatcccccagaatcctgcgccgatcacgacaaaaccggccaccatctgcatattctgtcttctgcctgatatggatgagcagagcatccgctgccgcacatccttcttgcggaacgccatcataatgtaaccgatcgtgtagcaaaggacggcaagtatgatatatggcatatactggaacagaaatgaatgcggcatggcaaatccgccgttcccgttcttgtcgatcagtttgacgtcagactccgttttccctgcctccgcggcgtcactgacagcctcgtctatgctgtaaccggcacttgtcagtacctttacggagttgaggaatgtagagatctgctggtcaacgtaaaacgcgctcgtcgtatctggaagctttgtcgtctgaagtttttctccttcctccaggcagacccgctcaaaatgctcaggtatcgtcactacataatagatgtctctgtagaagagcttttcctggatcacattcttgtcatctttcactttcacaagatcgtgcctctctccgaggtactccgtaagccctttggccagttccccgtggtcccggtcgataaccgcaatcttcagcctctcctcctcaaagtgctccatccccttcccctttgtcatggtctggaccataacggcaatcgtgataaatatagccagatacataaacatcatgccgaggttgcgcttaaccatgatcataaatcctctaaatactgtcataacgttccctcctcactgacataaacgcgatccctatgaaaagtacgctcataagcgcaagaataagcagatttcttgtaaatctctccgtatcgttgaacacacccatacagtaaaacgtatcacttaataccgctgccgggttgatccggttgatgatcgggcagttctgctctattatatttttcatgttgccgaacatcaggcccgcaagaaatcccggaagcagcgtcatcataactgtcagccccatcttgatgccctcgctcatcctgctcacacatccgagcataatacccatcgacaccccgatcatgctgccgagcaagtctacgagcaggatctgtgctatattcccgccaagctcaataccaaatccaaacctgacgacaagcgtcaatattacaatattgataaattgtataaaaaacagtacggacatatccgtgagcacaagccatagtttatgggtcggcgtcacgcttcttctcgccccgagagccgacagattggcctgcccgtcaagactcgcctgcacgccgagaaatgcacccgacagacatgcataggcaataagcgcaaagaaatacgagacattcggatccatcgtcttgccgccgagacgtatctcctccgtcatagtctgccatccgtccagcgcttctaccgcctgcatcagccgatcgggatgttcccgggcgatcttcatgagcatgttggcattcttattgtagctgtccagaagcgactttaaaatgctcgtatttatttccgactttgcaaccgtgagcgacggttcagtgtcaatgtaatagattccggtgatctcatcgctttttaagtctttcagcgctttcttttcatccgtctttacgatcttaactgtctcaccgtccatctcatccagaaaggcacggaacgcacttccctgatcgcagtccgcatcgcgctcaactacagctacgcggatcgtctccatctcttcccctgtcataccgtttccaaaagaaacaaaaaagaatataccgagaataatgggaaacgcaagtgcccagaacataacgctccattcccggaccgtctgtaaaaatctgtatttaatcagatgcagcatactctcccctcctaatccctcagctcagtcccggtgatctccagaaatacgtcgttcagtgtaggcagctctgaaaataccctgccaaatgaaatatcctgttcttccatataatgcagcactctcacaagattatgtttcgctccgctcagcctgatctttaacgtctgctcatcgtaagacacgtcaaatacatgcggaagctcctttatctgtgccagatgcttctcttccagagctgctgcctgtatcgtgatcgtctcgcctgtcttgatcatgctctttaactcttcctttgtccctgtggccagcacacgtccgtggtcaatgatcgctattctggagcagatctgttccacctcttccatataatgtgatgtatagatgatcgtcgagccctgcctgttcagctccatgatcccttccagtattttattccggctctgcggatcgaccgccacggtaggctcatccatgatgataagcttcggtttatggacaattccacaggcgatgttcagccgcctcagaagtccgcctgataatttcttcggccgcatcttcgtataatcttccagtccgacaaaacggatcgcctcatcgaccagttcccggcgttttcctttattccgcacatacaggccgcagaagtaatcaatattctctcgcacgctcatctgctcaaataccgccacattctgcatgactacaccgatttcttttttgacgctgtaactgtccggcctcatctcttttcccatgaccttgatcgtccccttgtcatatttcaaaagcgccagcagacagttgatcgccgtcgtcttcccggaaccgttcggaccgagcagtccaaatatctctccttcgtgtatctcaaggtttaaatggtccagcgccagcaggctgccgtacctttttaccagattttgtatcgtgatcatgtttaaatgccctccttctccttttctacttgtagtataccttccgccgctttataatgtaagtgtcacgtgtcagcgcttaaaatgacatttgtcacaagataaggagaactctatgaaacgaatacttgaccagctcgtccttctcatattcagctttacaactatattactgatgcacatagataccgcttttatcatatcttttctgactgccgtcatctatatctctgccaactattttgtcgattcacgaaagttccactttctgtcttctgccttctatattttgctggctgtctttttccctgttcttctgtacttcctcccggcggtcctttacacctgtctctggtacgataactatatcggtctggccgcagtctgtgttaccgctctctgcaggatcctgccgctctcctggccgctgtttctccttctcgcgttcggctgcggcatttcgctgctcctctgtttccagacagaccggtatgaacagctggaacaacggtttaaacagacacgggacgacagcacggaacggaatctgctgctgaaggaaaagaaccacgcgctccttgaaaaccaggattatgaggtgtacaccgctactttaaaagaacgcaaccgcatcgcccgggaaatacatgacaatgtgggacatatgctcacccgctctatcctgatgacaggcgctatacggacggtgaacaaagagcccgctttagagtcttccctgatacagttggaagagacgctcaacactgccatgacaaatgtccgtgaaagcgtacatgacctgcacgatgaatccataaacttaaaagaagcgctcacaggtcttaccgacaccttcaccttctgtccgatccatctggactatgatatgggctatgacgtgccaagagacatcaaatacagttttatcacgatcgtaaaagaggcgctgaataacatcatacgccacagcaacgcgactgacgttcacattatcgtccgggaacaccccgggctgtaccagcttgtgatcgaggacaacggaaccgtaaagagccgcggaagcggccttggcctcactaatatgaaagaccgggtggaaacactgcgcggtacgatgcagctgcagaccgaaaaaggcttccgcatctttattacaataccaaaaagggaggattaactgactatgaatatactcgttgtagatgatgacatactcgtctccaatgctctgaaaacgatactggaatctgatgacaccctccatgtggcgggtaccggagaggacggggaggacgcagtgcggctttacggcgaactgaagccggacgtactgctcatggatatccgcatgaaaaaactgaacggacttgacgcgtcccgcatgatcctctccgattacccggacgcccgtattcttcttctgactacattctcagacgatgaatatatcgtgaaggctttaaaatgcggcgtaaagggctatctgctcaaacaggattacaacagtatcatccccgcagtcaaagccgtacacacaggacagaccgtattcgggacagagatcatatccaagatcccggatctgctgcagaaaaaaagcggatttgactatgcgtcctgcgatatcggcgaaaaagaatatacgctcatcaccctcgtcgcggacggcttcagcaacaaggagatcgccgaaaaaatgtttctgagtgaaggaactgtccgtaattatctgagcaacatactggataaactggacctgagagaccggacacagcttgcggtcttctactatcagcatctgtaactgcccaccacacccatagaaggaggcatctgcatgacagatctagactatgacacacttgaactggatacacccctggcaccggcctatcatcatctgaagccgcttgacaccgtcaatggctttaaaatacgccccggcttttatgaccacaacggcgcctgggcaatgcccaacggcgtaagcttcaccgtacattcccagggagcggtatcgtgcgagatactgctgtaccaccgcacggagacacagccttacgccgtcattcccgtaccggactgttaccgcatcggccacgtattctccatcttcatcttcggccttgatgtggaagaatttgaatatgcgttccggcttgacgggccgtatgacccggagaaaggcctgcttttcagcaaagacaatattctcatcgacccgtacgccaaagccgtcaccggccagagcacgtggggtaaaaaggcgagttcggacggataccgtgccagggtcgtcagaaataatttttactggggcgcagaatccccgtctcagataccgtttgatgaactcatcatctatgaaatgcacgtccgcggatttacaaaaatggcccaggatgtgaccgcccccggtacctttaaaggtatcatagaaaaaatcccatatctcaaaacactcggcgtgaacgccatagaattaatgcctatctttgaatttgacgagctgatggaccggcgcactgtagatggaaaagagctgctcaattactggggatacagcacggtcagctttttcgcgccgaacacaagctacacatccgccgtggagtacaaccgggagggacttgagctgaaacagctcgtcaaggcgctgcacgacaacggcatggagatcatcctggacgtcgtgttcaaccacacagccgagggagatgaaaaagggccggtcttctctttcaaaggatttgacaacaatatctactacatgctcacgccggaaggctactattataatttcagcggctgcggcaacacaatgaactgcaatcaccctatcgtgcagcggatgatcgtggactgtctccgctactgggtggaaacttaccgcatcgacggctttcgtttcgaccttgcctccatcctcgggcgaaatgaggacggctcccctatggagcatccgccgctcatcaaagcgcttgcctttgacccgatcctcggcaacacaaagctcatcgccgaagcctgggacgcaggaggactgtatcaggtcggagacttctctgacctcaaacggtggtctgagtggaacggacgctaccgggacgacctccgcgaattcttaaaaggaggcctctggtgcgcaggggcggccgcccagcgtatgatcggttctcccgacttgtatgacccggagatccggggcaagaatgcctccgtcaacttcatcacctgtcacgacggatttacactctatgatctgtatgcgtacaacacaaagcataatgaggccaacggctgggataacacagacgggagcaatgacaaccgcagctggaactgcggcgcggaaggggagacctccgatcccgcggtgaacacgctgcgcaggcggatgatccaaaatgcctgccttgtgctcatgtgcagccgcggcataccgatgttccttgccggggatgagttctgcaatactcagtacggcaacaacaatccatactgccaggacaacgagatatcctggcttaactgggagatgcttgagaagaatcaggatatcttccgcttcttccggttcatgatacatttccgccgccggcatgcgtccatccgtggcacctgccgcccgaaccggtacggactgccggaagtaagcctgcacggcgagacgccgtgggatgcctcctacggcgcagacaccagagtcatcggcatcatgtatgcaggctacgacgaggcgcggaaaaaagatgatatcatctacattgccgtcaatgcatactgggagtccgtgaccatcaccctgccggagcttcccgaccatctccgctggcacacagccgccaataccggagacacggactgcacctgctttgaaacgcccgctcctctggattccgggcactttctcatgggagagcgctccagcatcgtgctcgtagcgcagtaagggagggcagggcctctctccattcagtgcccggacagaccacaataaaagcagacctatcaactgcattggcgtatgagtttcttttttgcccatacgttacttttaaaatataataatccgacggctgcgggcaatatgggagaaactgcctgaccgatatatattcctgaaaaaccgatatcagctgcaaaagccagcagccagcatacaggaagccggacaactgccgcgtccagaagtgcatttgtcatagcggtacccgcggagccaatgccgatcgcaaaggagtcaaacgtatacatgaccgcgtagatcaaactgttaataccgcagcatattctcagatacaggacaccgtctttgatgacttctgaactttccggttcaaacagcatgatgatctgttctgcagacagctgcacaaagataactgccatcaaggtaatacatacattcaaatacagcccggtctttgttgtctttctcacgcgctccatatcatccgcacccatattctgccctgccatagcagtgaccgcctgcccgacagcccagcatggcatacccgcaaatgtgttgaccttaaggccgacgccggacgccgcggcaacggatactccgaaattgttgagcattcctgtaatcagaagataagagacattgacaactgccatttgaacagcggcaggaagcccaacctttaaaatagccctcagtgtatcccatcttatgacaaagcggtttaacttaaaatcaaagacagccgttttctttttcaagtaaacgatggagacaaaaagcgaaacaccctgtgataaaacagttgcgcaagcggcgcctgctgttcccataccgaacggaccaactaatataaaatccagcacaatatttacaacagccgcagtcgcgacaaaataaagcgggcttttggaatctcccagccctttcataacggaacataccgcattgtagccaaatacaaataccgtaccgcagcagacgatcttcatatattcgcaggcgtcctgcatggaagccgccggaacattcagcacttgaaaaaggggggcatatacgaacagccctatgaccgtaatgataaatgatgcaatgagggatattccaaataatgttccagccgtctcaatctgcccctgttcgtcattcgctcctttatactgagcggtcaaaaccgtgccgcccatcgtaatgccaatgcagacagaattaatgataaaactcaccatagacgcattgctgattgctgcaagccctgtttcgcctacgatatttccaacaacaaccatatctgctatgctgtaaacagactgcagcagattggcaaataatataggaagtgcaaacaaaatcaatttttttggtacgcttccggtagttaaatcttgttcttccttcattttcccaaattcctttcttaacacaaaaaaacagaggagaaacacggtgacagtgcgccctctgcaaaaaaatttatagctatatgcaaaagacagcagacaaaacactgcctgctgccccaaatatcaaaataaagataagaacacgagaacaaagctccggactaaactgtcatgccggaacaaaccttgatctaaacgttctcgtattcatcaggctccgtacaatgctttgaagtatcaaattgtgcggagctgtaatcaatgcaaaatttcccaaataacattgtactcaccttttcttaatattctttatagtgcaattatagctgtctccgttccccttgtcaatcatgaccatgtaccataagcaacgatggccgcattcatcgataatccggacgccgaagtgtcactataaaacgaacaccttacctcgccgccgcttatcgtcatacgcttaaaaatagatccgtccgtctatgaccagaaataaaatattttttttgacagtaaaagagagcctgtttccaagctctcctgacttaattataaattatttccagtatccatacgcccttgcgcaataatacgtcttatacttaacatttgcaaaggatacaaaataaaatcccccgaaactggttgcagtttcttgggctctcaaagtccagtaatatgaagaatgtaatgcgagctccacaccatataactgtttaaaaggtacggcgtaattccctatagatataaattctgaacaatatccacttccccatacactcatacttttaggtgctaactcagacgttctaatacactccatccatccattctcatacttaatagccaggccgttttgatttttaactatctctataataccggccggaccctgatctcctttatcgccttttggtccctggattccctgcggacccggtgctccagctgggccggtatcacccttgtcgccttttggtccttgtgggccagccactccggggtctccttttataccttgcggaccggctgttccgggatcgcctttgggtcctgtggctccggttggtccctgagctccagccgagccggtatctccttttggacctgtggctccctgtggtcctgtagcacccgtcggaccctgcggacctgtcagcccctgaggtcccgtcaagccctgcggtcctgtagctccggttgcgccctgagggcccaccggaccagtctctcctctgtcacccttatcgcctttcggaccggttgcaggcacctgcgtatctgtatcacctatgtaccagttgccgttggcgccgatatgcggcgtgataccgtcgtctcctcttgctttgactcccgtgtcataattgttgataaaccagtttccattttctccgatataaatttctggtatgaagtttgcgttgttttccattttgtattcctccttgttatgtgatagctgtatcttatcaactgtcaccaggacaaagagggacacatgtcagatttttttaattacatgtaaatgcctttaaaaaaacaaacaactaaaggagagcctgtctccatactctccttaattttactatagttttctgtatgtgccgataagtgtgcccttaatagtaatatccgtattaccttgattacgcattcttacgtatatagtgccatcattaaatgtgataggagaaaacaaagaaaaataactgccgcttcccggatcaagtctaatacttgaagatatacattcatatccatttataattggcaaagtatacactccgtaaccagatcctgcatcttttgcagcaggaaggtacatactcataggtctttcacaaaactctaatttgctatttaaagctttcccctgccgggcatccaacgcatacccttcctccgtagtttcaagattattcgcaatattcaccggaccggccggaccctgatcacccttgtcgccttttggtccttgtgagccagcctctccggggtctccttttataccttgcggaccggctgttccaggatcgcctttgggtcctgtggctccggttggtccctgagctccggccgagccggtatctccctttggacctgtggctccctgtggtcctgtagcacccgtcggaccctgcggacctgtcagcccctgaggtcccgtcaagccctgcggtcctgtagctccggttgcgccctgcggtcccaccgggccagtctctcctctgtcccccttatcgcctttcggaccagttgcaggcacctgcgtatctgtatcatctaggtaccagttgccgttggcgccgatatgcggcgtgataccgtcgtctcctcttgctttaactcccgtgtcataattgttgataaaccagttgccattttcaccgatataaatttccggtataaagtttgcgttttcttccattttgtgttcctcctcgttatgtgatagttgtatcttatcaactgtcaccgggacaaagagggactcatgtcaggttgttttgagacattgaataattatgattaccaacttaactggtagtttgcttaatcactattagctactgttctttctttaccttttaagaaactcttcatacgttctatcagtcatttttatcaacttcagataaatttcacaatagattgtgacaatagaaagcattttaccaccatactatatgtgctaccatacaatcttttttacaaattttgagtataaaaataataaaaggatggcaactatttcattaatttggcttcgtccttcttctggtattctattcctgttgtcatttttctccatcctccacctcaatcactactggcctatcagttgaaaatcctgtattgttaacatctttatcttattctttgttaaaatgcttgagctcatttttcatattacagaccacggaaatgatcttaaatcgtgtttcttagcttgtaactctgacaagtttccctgctatctggttgtattctaaaatgtttgttttctgctgttcaaagtccccctctatttctctaattgaattatctatatctattatattttaatttagcttatcattttacgtaaccagatactgaccaagaatctttagcgctttcttatcattatgctttatctcaacaccgctgacaccctctttactctagaaattatacgagtcttttctcccagcaaataaatatcttctacactctgttttaccctgtgcatttctgttgttcttccatgcgcttattgctataattcacatgattaatatttctctacaattcttttgctttaccatcactcacctcatctccttaatttatcgctaaaaatactccgggcctgaaggcaccggagcatgctatctttattcaaaaaattctctaataagattttgcatttctatgtcaaacatacgaagtctctcttccaatttcaccatattttctatatcttttgaattcaacagttccttcaaagcatcatccattttcttatcaattctgtcaacaagccgttttttggtctcatcaaataacttctctgcattatccatttcccgcattagtttatctctattttcaatatattcgtgctctttcataatatcctcctttccatcaatatttccagatatcataagaacctccgtcaaaagtaccctaataactatctatcttgaacttccatatcaatatttattacattaaaaattcatataattcctccatacaaattttctctcacactgataaacctaattttataatataccacattctgacaattatcaacaaatgcgcgagcaattttagcataggaattatacagctataacaaaacatacgtttattcatgtcaagcaacaaaaagaagctctaaaaactttcaaatttcctttcaacgtatttatgaagggttcgtaatatatattttctcaatatgtacttttgctactctctgaattacaaactcaagaaactttaattgtcaccgaaaaaggccttaaaacgctataaagactttcacaaataaagcactctaggaattatatgagcggtataaaatgaatcacctgttaaatgatactggacatacaattgttaccaattaactatttttcaatcaatttttagcaattttataaaaagttgcacaaatgaaaaagtccaggaaacatcacgcttcccagacttttagactttaatcgtcaaaggcttctttcattttatccataaagcctttcttttttccttttgtacccttcgtaccttcatctttgttctggttcagggtatttccggtcagttcatcgaacttgcggagcgcctctttcgcctcggaacttaagtgttccggtgtctggatgataagggtcacatagtggtcgccgcgtacctgggcattgcggagcgacggtacccccttgccttttaagcgcactttcgtgtcggtctttgttcctggttttacagagtagagtacatcgccgtccacggtcttgatcttcacatccgcgccgagcgctgcttgggcaaatgagatcggaactgttgagaatatatgcatatcctgacgctggaatatcggatgccttgagacaaccacctcaacgagaaggtctcccctcggtccgccgtttgcgcccggctcgcctttctctctgatgcgcacgctctgtccgttgtcgatgccggccgggatagatactgctatctttttcttggacgctacaaatcctgtaccggtacaatccggacatttttcccgtatgatcttaccggttccgtgacagtccggacaagtctgtacgttctgcacggtgccgaagaaggactgctgcgtgtagactacctgtcccttgccgccgcacttggagcatgtctccggggacgtcccctgctttgcgcctgtgccgccgcatttcggacatggatctttcagcacgacctctatctctttttcacagccaaacactgcctcttcaaacgtgatccgcacgctcttgcggatattcatgcctttcatcggaccctggcttccgcgtccgcgccggccgcttcctccgaacagatcgccgaagatgtctccgaagatatcactgaaatcagccccgccgaagtcaaagcctccgaatcctccggcgccgcctgcaccgccttcaaaggcagcgtggccgaactggtcatactgacggcgtttttccgggtcgctgagaacagcgtaggcttcggaagcttccttgaacttcttctccgcctccgcgtctcccgggttcatatcagggtgatattttttggcaacctgtctgtatgccttctttaaagttgcgtcgtcagcatctttgctgacaccgagcacttcatagtaatctctctttgattctgccattgttcatccctttccttcatggaagtcgacaaagacaagttccgggggaccgggcttataccgccaggttccccggaacagccttcttacactgagctataaccgttctgccgagtgctcttagacttctttgtaatctccgtctactacatcatcgcctgcaaatccgtctggtgccggacctgctcctgctcccatgtcaggacccggaccctgctgtcctgctcctgcctgcgcgccggcctgttcgtaaacttttgtgaacaacttctgggcactttccatcagcttttccttacctgctttgatctctgcgatctgagcgtccgtaagggtctctgtatttgctttttcaagaatctctttcaatgccttgcagtcagcttctaccgcttctttgtctgcagcgtcgatcttgtctccgacttcacccatggctttctctgtctggaatacaagcgcatccgcatcattcttcgcgtcaatgccttctttacgcttcttatcctgtgcttcaaattcagctgcttcttttactgccttatcgatatcgtcgtcagacatattggagccggctgtgatggtgatgtgctgctctttgcctgtgccaaggtcttttgcggatacatttacgataccgttggcatcgatgtcaaatgtaacttcgatctgcgggattccgcgcggagccggcgggattccatccagtctgaactggccgagtgacttgttgtctttggcaaactgtctctcaccctgtacaacattgatatcaacagctgtctgattgtctgcggctgtggagaatatctggctcttctttgtcgggatcgtcgtatttctctcgatcagtcttgtcgccactccgcccattgtctcaattgacagtgacagcggtgttacgtcgagaagaagtacgtcgcctgcgcctgcgtctccggcaagctttccgccctgtacggatgcgccgagtgcaacacattcgtcaggattcagggatttacttggttcttttcctgtcagacgcttcacctcttcctgaacagccgggatacgtgtagaaccgcctacaagcagtacctggccaagttcagaagaattgaggcccgcgtcggagagcgctctcttaaccggctctgctgtcttttctacaaggtcgtgtgtcagctcgtcgaatttggctcttgtaaggttcatatcaaaatgcttcggtccttcagatgtagctgtgatgaacggaaggttgatgtttgtcgttgtagcggaggacaactctttctttgccttctctgccgcttctttcagtctctggagcgccatcttgtctgtggacaggtcaacgccttcatttttcttaaattctgccagcatgtagtctgtgatcttctggtcaaagtcatcgccgccgagtctgttattacctgcagtagacaatacttcaatgacaccgtcgccgatctcaatgatagatacgtcgaatgtcccgccgcccaggtcatataccatgatcttctgctctttttcattgtcaagcccgtaagcgagcgctgctgccgtaggctcgttgatgatacgctttacatcaagtcctgcgatctttcctgcgtcttttgtagcctggcgctgagcatcgttgaagtatgcaggtacggtgatgaccgcttccgttactttctcgccgaggtagccttccgcgtcagctttcagcttctgaagaatcattgcagagatctcctgcggtgaaaacttcttgtcgtcgatcgtaactttgtaatcagaacccatctctctcttgatagaagagatcgtcttctcagcgtttgtgactgcctggcgttttgcgggctcgcctacaagacgttctcctgtctttgtgaatgccacgacagacggtgttgttcttgcaccttctgtatttgcgataactgtcggctgtccgccttccataacagctacacagctgtttgttgttcctaagtcaataccaataatcttgcccatgattttttcctcctgatttttattttcaaatttagtgttagtttgctacttttaccatactgtgtctcactacagagtcacggtacatataacctttctggaattcctccgcgataatgttctcgccgagtgcctcatcatccacgtgcatcaccgcattgtggaagtccgggttgaactcctggcctacggcctcgatcggcttcacccctatctcttccagcgtcgtcataagctgtttgtagatcttatccattccctgtacaaacggattttccttctcctccgctgcggcgtcaagtccgcgctcgaagttatccactaccggaaggatcttttctatgatatctttcgctcctatctcgtacatctgtgacttttccttgtctgtacgcttgcggaagttatcaaactctgccatctgacgggtgagtctgtccgtcagttcctcgatcttttcatcttttttatctttctttggcttcttgccaaattttttgatctttttgtcggccttttcagcctcgtcggaatcctcgtccccgcagttatctttggcgtcttccgcctcccctgccgtcttgccgtctgcctctgtggcgccttcggcctcctgatcttccggctgttcatccgctgcttcggatgccgcctttttcgcttcctccactgcctcttttaccatatcttctttacttttgttttcctgattattttccaagggttcttccacctttcctagtcattattatgaaacatctggtccagctcgttctgcagctttttcatagatttaagcacatgttcataatccattctcttcggtccgataatacctatcgtgcccttcatcccttcgcctaattcataggttgcggtcacaacactgcagtctttcatcgtctgtaccggcgtctcatctcctatatatacctgaatgcccgtattgtcttcctgggacagtgtctgggtcaccagctctgtcagctgctgcttctcttcaaaagcgctgatgatctcctgtgcgctctgcttgtcgctgagctccggatatttgaagatgttcgtggcgccgcttgtgtatatctgcatctcatcatcgacctggatcacatccgcgaccgcatcgagcacatggccgatgacctcgctgtgtatacctgcctgctctttcagccttgcgatcagtcccaggttgatatcctcgatggacatgccattgagcgtcgtattaagcagcatattgagcttcagcagattctcattgctgaccggctcttccatgtcgattatcttattcttgataacatttcctccgagcacgataactgcgatcacctgctcttcgtctacctgcgagagctgaagaaattttattttattgccgctgttgagcggagtggaaaccatggttgcatagttcgtgctgttggccagcacttttgccgcctgttttagaagctgttccatcttgtctgccttgtcgagcatctgctcctgcatctcattcagctcctgctccttctcctccatcagcatatctacatagagcctgtatccacggtctgaaggaatacgccctgccgatgtatggggctgcaagatgtatcccatttcttccagatccgacatctcatttctgatcgtggcagagctgagattcaagtccgtgtacttggaaatggttctggagccgaccggttccccggtctccaaatagttctggatgaccgcgtgaagtatcttcatcttacgttcgtccagcctttgttctgataccatctattcgcctcctttaccggattttcagcctgttagcactcttttaaaccgagtgctaatatcttcgtttattaatgtatcactatagattttatttgtcaacactgtttatactttttttatattgaaacacaaaatattcagcgccgcataaatcacctcataaagcctcattgtccgggcgacgcaaaaatatccgggatagctgtcaatttctcatctatcccggactgtctttatttttatggcctatgtacctgccgccttttaactgagctccgctctctctgcctcctccggcttaaaatcattttccagatcgtagatattgtggccggtcgattcgctgagcactcttccttccagagaatagcaccggataaaacgctttccgtcaacacttgaccaatgttccacatcccatgtaagatagccgtcctcgtccgtcttcttctccttcagatacagatcgacctggcgcccgtccttcattacatttataaggccttttgtgccgtcgatctcaacctcttccttttttactgaatcataaatcttcatataacatatcctcctgatcttgtttcgttctcataaaatcattatacctgtattgtccgtaaaactcaatggcgcttccgcattttaaaattacacttgacttttcttttgtactattatattattgtactaaatcaatagtacaatttgcaatgcacataaaggaggcatttacatgagtgttatactgagaacgaaccatatcacaaaacggtacggcagccgccctgtagtcagtgatctttctatgacgatacataaaggtgacatctacgggtttatcggaaaaaacggagccggaaagactaccctcatccggatgatcaccggtctcgccgcgccaagcgacggaaatatccttctgtttggaaagcccgaccttctcgaaggccgcaggaagatcggcacagtcatcgaatctcccgcattttatcccggcatgaccgcccgggagaatctgatcgctcagtgcaggcttcagggagaagacaccgcccaggcggacgagattctggcgcttgtagggcttgacgacacgggaaagaaaaaagccaaaaacttttctctcggaatgcgccagcggcttgccatcgccatcgccttaaccggcagcccggaactgctcatcctcgacgaaccgactaacggactggacccggaaggcataaaggagatccgtgaactgatccttaagttaaataaggaacgggagatcacagtccttatttcaagccacattctgggggaactgtccaagtttgccacgagatacggcataatacaccaggggaaactgatcgaagaattcacagaggatgaactgtgggaacgctgccacggctctgaccctcataaggccatggatctggaagattatttcttaaaaagaataggaggtatgtaagatgaggaacttgcttagaaatgacttttataaattaggaaaggcaaaatatttctgggtatgcctgatcgtgaccgtcgtgctcgccgccgcttcggtcttcctgttggattttacctacaagatcgccggagatcagatgtccgcacagatggaacagcagcagaaagcgctggatgataacggggtaaatataacgacggaaggcgtgccggcaagctacgatgaactgagcgcctccgggcagctgctctctttcttcgccggcaacacgacacttttgcttgcagtgctcgtctccctcttcgtcggaagtgaatttaataacggtacgatcaaaaatatcgcttccaggaattacagccgcggcaagatctatttatcaaaacttatcgtatgcatcatcacgggtgtcgtgtttacactcatatatgccgctgtctcaactgccgtttcatccgcgctctggggctttggcgacatatccgccggctactggcccgatttttttaaagccgcggggattgaactgctgctcggaagcgcctttgtatctatctttgtcatgttcagtatgctcatccggcaaaacggcggttcacttgcggcgaatatatgctttcttgaattcatctcacttcttgtcatgctcggggagatgcttctcaaaaagctgttccacataaccgccacactgtcgaactacctcatagacacaaatatgaccgccgtgtccgccgggcttacccgggcgaccgccatacgcggcgtcacagtcgccgtgtgctttctggctgccgcagcgattatcggcatcgtcagctttcagaaacgggatatcaaataagaaaagagatgccgcagcctgctgtaattcacagtggactgcggcatttttctccatcatttatctgctgcggatatattccatccattcacttatctttttctcatatccgttgctgccggcttcataaaaccgtgtcccggcgatctcggacggaaggtactgctgctccacataatgatgcggataatcgtgggcatatttatagccgatcccgtgcccgatcttctttgcgcccccgtaatgtgaatcctgaaggtgcggaggcactgtcgtcttatgctgtctcacattctccatagcgtctgcgatcgcatttaccgccgagttgctctttggcgccgtcgcaacatagagtaccgcctgggaaaggatgatctgcgcctccggcatgcctatacgctccgcggcctgggcggcagacacggcgacgttcagcgccataggatccgcgtttcccacatcctcagaggcacagatcatgatccttctggcaataaacttgatgtcctctcccgcatacagcatcttggcgagataatacaccgcggcatccgggtcggaaccgcgcatgctctttataaacgccgagatcgtatcataatgattgtccccggacttgtcataccggacgactctcttttgaatacactcagacgccacgtccagcgtgatgtggatcttaccgtcctcactccgctccgtcgtcagaacgcccagctccaccgcattcagggcatttctcgcatcgcctccggcaatgtcggcaaggaattccagagcgtcctcctctatgacggcctggtagcttcccatccctttttccacatccgtaagcgcccggcggatcagcgtcctgatgtcttccttgtcaagcggatgcagctcaaagatgctggagcgggaaataagcgccccgttcacctcaaaatatggattttcagtcgttgcgccgatgagtatgagcgttccgtcctccacgaacggaagaaggtaatcctgctgtcctttgttgaaccggtggatctcatcgacaaaaagaatcgtcctcttctgatacatcccctgcagttcttttgcgtgttttacgacttcttccatgtccttcttgcctgccaccgtcgcattgatctgtgtaaactctgcgctcgtcgtgttggctatcactttggcaagggtcgtcttgcctgtccccggaggaccgtaaaatataatggagctcagcttgtccgccttgatagccctgtacaggagcttgtcctttccgatgatatgctgctggcccaccacttcatccagcgttgaaggcctgagtctggaggccagcggagcctcattatccatattcttttctctggcgtaatcaaataaatccatttctttcttcacctctctgacgggggtctgtcccctctgcctcattttcacaggggtctgtcccctttgccgcgctgcctgccatgatatccctgaccgcttcgcctgctatgagcagccccgcaacaggcggaacaaaggaaatgcttccgggtagagaacgcctgcttcccttgtcttcttcggatgctctggcagatatatccaccggcttctcttttgaatacagtaccttcagatgacggatgccccgcgccctcagttctctgcgcatcaccttgcagagcgggcagaccgaagtcctgctgatatccgcgatctcaaacagttccgcgtgcagtttgttgcctgtccccatactgctgatgacaggtatcccgtattccagcgctttctctactaccgccagtttggcggtgaccgtatctatcgcatctatgacatagtccggacgctgcgcaaacagctcctccacattgtccggcagtacgaaagtctcataagtcatcacctccgtcttcggacagatatcttttatcctttcccgcatcacttccgtcttaaaccgtccgatcgtactgtgtgcggcgatggactggcggttgatgttcgtcagtgatacggtgtcattgtccacgaggacgagacggccgacgccgcaccgcgccagcgcttcaatacagtgtgaaccgacaccgccgacaccgagcaccatcacggtgctctttcttaatatatgaagcttctctgccccgatcagcagctctgtccttgaaaattcatttatcataatgtaaagccctgctccttttattccatgatcaatttatctgccgtcacgaactcaaacccctttttctgcaggatgtcaacaattctaagagccgcatccacagaggactcataacagtcgtgcaatagaataatatcattttcctccgtttccgtcactaccttattcacaatttcatctgtattctctgtcgtccagtcaagcgggtccaccgaccacatcacaggcatcacatccatctcaagctccaggttcttctgccatacgccgaaaggcgggcgcatgtattccacatgttctcctgtgacagaggatatcaccttgtcggtgtcctcaatttctttcctggcctcctcgtcagacttttttgtgatgtccacatgatggtatgtatgatttccaataaggtgcccttcctcgtatatgcgtttcacaagatccgggttgtcttttgcgttcatgccgatcaggaaaaatgtggccttcacccctcttttttttagtccgtccagcagcctgcccgtacactgggcattggggccgtcatcaaaggtgagggcgatcttgggcgcctctctgacgaccgaagaatctacgaaatcgactgcttctttcagttgtccggaatcttctgctcctgttttgttattcagatccattgatatgccaagtatgctgaacaggcaaagcgtatatgccaatccacaaaaataaagcactttatgtctgcccggcctgccaggtattgcgcgtcttttattctgatgctccacgttacagcctcttccttctttctgacctgtatacttctctaatgtatatgaatcataagaaattagtatgaggctgattgcattatattttttatggtggtataatagcccttgctgtactataacacaaaggaggactcacacatgccagaaatacagaagcaagaaaataaaatgggtgttatgccaattcccagactgttaattaccatgtccctgccaatgatgctttctatgctcgtgcaggctttatataatatcgtggacagtatgtttgtcgcccagctcagcgaagacgctctgactgcggtctcactcgccttcccgatccagacactgatgatcgcggtagctgccggaaccggtgtaggcatcaacgcgctgctgtctcgcaaccttggggaaaagaattacgaaggcgccaacgatgccgccagaaacgggcttttcctcggtctcatcagctgtgccgtattcgcggtgctcggcgggatcggttcacactttttctttgccatacagacagacaacgatgtcattgtaacatatggcacacagtatctcacgatcataaccgtgctctccttcggcatctttctgcagatcacgttcgagcgtctgcttcagtcaacgggaaagacgatctataatatgatcacccagggcaccggggctgtcatcaatatcattcttgacccgatcctcatctttggtctgttcggctttccgagacttgaggtcgcaggagccgccatagctaccgtgatcggacagatcgtagcagtgaccatgtcatttttcttcaacctgaagaaaaacagggagatcaatatcaacatgcggggattccgtcctcacggaagaacgatcgccgtcatatacgaagtcggcatcccttccattatcatgcaggctatcggctcggtcatgacatttggaatgaacaagattctcctcatgttctcctccacggcggccgccgtattcggagtgtatttcaagctgcaaagcttcgtcttcatgcccattttcgggctgaacaacggcatgatcccgatcatagccttcaattacggagccagaaataaaaagcgcatcacagatacgacaaaactgagcgtgatcatagcggtcgtcatcatgctggccggtttcgttatcttccagacatcgtccggtttcctgctgaaaacattgttcgacgcttctgacaatatgatcgagatcggcgttccggcgcttcggatcataagtctcagcttcctgtttgccggatactgtatcatcgtaggctccgtcttccaggcgctcggaaacggtatgtacagtctcatcgtatccgtcgcgagacagcttatcgtgatcctgcccgtcgcctatattttcgcgacagtgttcggactccacatggtatggtggtccatccccatcgcagagatcgtgtccgtgattctctccacacttctgctaaagagaatctaccggctgaaagtaaggccgctgggggagcagtgattggggattttgttgtagggatttgaacagctgcagcgtacggcagaaaaacggcggcagggagctgcgggacggtcggtgcgcttgcggtctgtaagggaaaaagacacggcagaaacagacaccgacagtattcaataggaaatctggatgatttcctattgaatactgtctcagaaactgcacttgtagtgcagtttctggtctgtctctgccgtgtctttttccctaacggaccgcaaagctccctccaacgccccacagccccctgccgccgtttttctgccgacatctcctatgaatcaaattccttcaacgcgtgagattccctgggtaacccttaatggattaacactgtagtgattactttcaaattcccatctataaatgcgtacctgacgcaccataaactaacattcaccagctccgtatcccggtaacaggtctatccattgggacaccccaagacggccttcagttgggaatgtttaccgtctggagatgaacaggcaaagggggcgggtgtacagggtgtgcagaagcgcgttcggaggcgggcgaggaagctgttgctgcagaaggagccggaatcagacacgggaatgttatcacaaataacattcccgagagcctctgagggaagaaatcctttcaggatttcattccgaataggctcggttgtctgattccggctccttctgaagttacagcttcccgactgccggagcgcgcttctgcacaccctgtacacccgccccctttgccgtccaccgccaacaaaccaaaacatccccaactaccgcggctttttcacactccacccgaacttcccaagctttctgcccagcgtcatatactccccgtgggagtaagccagaagaccggaagcgttcagctcaaactttccttttttgtccatatagtcctcatccgcctgtacggcggcaacttctgccataaacatatggtgggtccccagttcttttatctcggtcaccctgcattctatatttaccggactctcctcgatcacaggcgcataagaaagcttctgtgcctttccctttgtgagcttcatctctttccatttatccacatctctgcctgactttaccccgcaccagtctgtagcaatggaaaggcgttctgtcgtcaggttgacgacaaactccccggtctcctttatcatatggtaagaataccgctccggccttactgagatataaagcatggcagggtcggaacagatggtccctgtccatgccactgtgatgatgttcgactccccgcttttatcagctgtgctgaccatgacagccggcagagggtagagcatatttcccggtttccataactgttttcccattcttttccctttccccggcgcggcttactgctgcagcactcccacgagcgcaggtatgagctgcttcttacgtgacaccacgcctttcagtatgattttctcagagtcttccggcagatcgaacgcgtccgtcacatatgctttcgcgcctgtgccgcagcacataagctctgtggattcacccagtatatctgtcagcatgaaatagatcatctgcaggttgtgctctttcaacaccttcgggagatgttccttcagcatatccttgatctccgccagttcttccctgctcatggaattgatctgtccaacgccgaatacggcgtcgttgaccgtgaactgcttgaaatcctggaaacagatatcttccgcgctcttgcccttcagactgcttccggcgttgaacatctccttggccatctcttccatattgatgtccgcgatctttgccagcttcctggccgtctgctcatccagcgccgtgcaggtcggtgagcggaataagagcgtatctgatatgatcgcacagcagagcaggcccgccatcgtgcgtcccggctttatacctgcctcctcgtacatctggcagatgatcgtagccgtacagccgaccggctggttgcggaagaacaccggccccatcgtctctatgctgccgagtctgtgatgatcgatgatctctacgatctccgcctcctcaatgccgtccactgcctgggacttctcattgtggtccacaaggatcactttcttcttgctcacatccatgaaccgccgcctggatataaagcccttgaaccgcccgtgccggtccagtatcggaaaatcacggaatttcttcttcgtcatcacctctttgatatcttccacataatcactcatacggaacgtcgtgagaggcccctggctcataaaatgcttcaccggtatgctctggttgatcagtctcgccgcggtgaacgtgtcgtggggcgtgctgattatgacaatgctctgctcttctgctttcaggataagttcctccggcacctcagccccctgacacactacgatgcagcttgcgtccacatccacggcgcacgcctgtgactcataccggttgccgagtatcacgagatcatccttctcgataaattctgccatcagatccgggttggatgccccgatggccacctttcctttcgtaaaatatccgtgttcattccccgtgacaagcctgccgtccagcgtcctgataatgttcttgtactgcgtcttggccttggacaggatcgtactgtcatacacctccatgtaggaagtggcgatatccccggtagagatgacccccaccagctcatcctccttcagcacagggatcgtctttacattattcgccttcatctttgcccacgtatccttgatggacacatttggcgcaaccccgtctattttgtgtatatccatatctttaacctgaagctttacatttgacagaagcgccggaggctccacaccgaacttctccagcacataatgtgtctcctcattgatctgtccggctcttctggcaacatactcttccccggtgatctcttttttcaaatacgcatatgcgatagcggaacagaccgagtccgtatccggattcttatgcccgaccacatacactttcccagctttttttcccatgatttcactccttgcaaattgacctctaatagtaagagtgccattttttgcagttttcgtcaacctaatttttccacatatatgtttttttctttgaacatcctgtaccttttatgctatactattaataatgtcacatgtcagacagtgcggaccctgcggggccgcatattatatgttagaaaggattttactatgagcgaagaattattacatgatgaagcagtaaacgagccgcagacgatggcggatctggaggcgcattttgacgatgccaatccgtggaatgtcgtaaagaactacatggaaaaagacactgttctcccggtaaagatcgaagggatcgtaaatgggggcgccattgcaatggtggaaggcctgcgcggattcattcccgcatccaagctctccttatcttatattgaagatctggagacctatctcttaaaagatatcgaagtacaggtcattgacgttgaccaggcaaacaaccggcttgtattatctgcccgcgagattctcaaggaaaaggaacgcaaagaaaaagaggcgaagatcgcaagcgttaagatcggcagtgtggtaaagggcacggtggaaagcctccaaaactacggagctttcgttcgtctcgaagacggtctctccggtctcgtgcacgtatcccagataagccagaagcgcgtaaaagcgccaaaggatgtgctcaacacaggcgatgaggtcacagttaagatcatcgggctcaaagacggcaagataagcctcagcatgaaagccctcgaagaagtgaaagaagaagttgaggaaaaggtcgatattcccaaatccgaaaatatcggtacaaatctcggcgacttgttcaagaacatcaaattataaagaacaggcgggacttaacggtcccgcctgaaatatttatcaactatctttgccgcgtcttccacgcattttacacagcaggcaagcggctggccgccttcctctgtcttcaggtcccggcagtagagggaatggtttttttctttaaattcctccgccgcctccagtatgctgccgtaagtttccagcttcgtggtcttcggattttccatatctcccgcactctttgcaagacttatgacgagaaacattcccacaaccgcgccgcacgtatccttaagtccgcccataccggagccaaagccttccgtcatcctgaacacatcttcttcctttacgcccagttcctcactatacgcgcaggccactgcctggcagcagttgtagtcctttctgaatttctcaaccgctgtatgcttatctgctgtcatattcttcctcctttgcagaacagatccaattactgacctagcttgacgcgggcaaggtcttcaagccatgacgccgcgcacgcgtcgctcggcatgcgccagtcgcccctcggagaaagcgcgaccgtcccgactttcggcccgtccggcagacaggaccgcttaaactgctgactgaaaaaccgccggtaaaatgtctccagccatttcagtatggtgatattgtcatattcgccctcaaacgccagcctggctattctgtatatcttacttggctcatatccgaaacggatcatataatacaaaaagaaatcgtgcagttcgtacggccccaccagatcctccgtcttctgagcgatctctccgtcttttggcggaagcagttccggactgaccggcgtgtccagcacatcgtacaatatagccttaagctcctcatccccgcacgtatccgcgtaataatgcacgagatgtctgacgagtgtcttcggaacagacgcattcaccccgtacatggacatatggtctccattgtacgtcgcccatccaagggccagctcagacatgtcccctgtaccgatcacgagcccgccggtctgattggcaatatccatcaatacctgcgtccgctctctcgcctgggcattctcgaatgtaacgctgtggtcctccgggtcatggccgatatccttaaagtgcaggctcaccgagtcggcgatcggaacttcacgaagcacggctccaagcttctgcgacatcctgcacgcattctggtacgtccggtccgtcgttccgaaacagggcatcgtcaccgccgtgatgcccttccggctaagctgaagggcatcaaacgcctttgctgtcacaagcagcgcaagcgttgagtccagaccgcccgatatacctactacggcgctgctgcacctggcgtgtgccagacgctttttaagtcccatcgcctgaatggtaagtatttcttcacaccgtcttgccctctcttctcccgcccccggcacgaacggcctggacggaaacgtcctcgtgagcaccgtctcagtctcctcaatataaaacgggatcctgaatagatttctctccccggatgtctggaacgtcgtgttcttcctccgttcacctgcgatacgatttacatcgatctctgaacagatcactccgttttcaaaacggcggcctgaacggagcaccgtgccgttttccgcaatgatattatgtcctccgaacacgagatccgtcgtggattctccctcacctgcgttggcatatacatatccgctgatcagccttgcggactgcccttcgatcagacttttccggtaagactcctttccgaccgtctcatcgctggccgagcagttgacgatgatcgtcgccccttcccgcgctgcttcaatgcttggaggcaccggcgaccagacgtcctcgcatatctccgcggaaacgacgagactgtccatgaccgttgactcgaacaaaagctgcggcccgaagggaacgacctgaccgtcaaacaggatctcccttgcctcctttggcccctggcggaactgccgcatctcgtaaaactcaccgtaatttggcagaaatgtcttcgtcgtaagtcccagtacagctccccggttgagggcggccgcaacattataaagctccccgtccaccgaaagcggcaggccgacgaacacgagcgcgtccttgtccttcgtaaaaccggcgatccggtgcagcgcgctccttgcatccgtcagaagtatatcctgcgtgaacaagtcgccgcacgtatatcctgtgacgcagagctccgggaacacaatgatctttgctccttcgtctgccgtctcctctatcagtctgcatatctgctccgtattatatgccacatctgccacccggatatcaggggtagccgctgccaccttaacaaatccctgtctcatgatcttcctccgtccaaacgttttttcttatctgctgcgttttatgatctcttttaattcctctatcgtgtaattgtaggcggcgccgcagaaatgacattttacctcgatgtcttcaccgtcgccgatcatctcttcgagttcttttctgccgatacttgcaactgccttttccacacgttcttttgaacagtcacaatagaactgtgtcggtaccgtgtctgtgatctccaggcccagatccccgagcagttccccaagcagctgttccggagaataccctctgtcgagaagttccgtcactgacgtcacctttttcaggttctcttccagccggcttatcgtctcctctttggcaaaaggcatgagctgtatgataaagcctcccgcacaccgcaccgtattgtcgtgattcatcagcacgcccaggccgaccgaggacggcacctgctccgaattggcaaaataatacgtcagatcttccgcgatctcgcctgatacgagaatcgtctgccccacgtatggctctttgagtcccatgtccttgatcacctgcagaagaccgataccgaccgctcctcctacgtccagtttgccgtttttcgcaggcagcatgacgtccgggttgttgacatatccttttacatgagcgcggctgtccgccgtcactgtgatgcctccaagggggccgtcccccctgacctgcagcgtcagtacatctgactcattcttcatcatgcttcccatcatggcccccgcagtcagaagccttccgagcgcggccgttgccacagggctcgtgttatggtacgcccttgccgtctctgtcatctctgccgtcgtcgcggcgaacgctcttatctggctgtctgccgctgtagctcttacaatatagtccttcatctatgttctgttcctttcttttatttcccctgttcctgtgcaatgacgcagatccgttcactcgaacaaagaggcgcgtcttctgtgtacgcgtcatacgccgccagacagataagcccggcccttttcagcaatgactgtatctgctcaagcgtatagcctctctggtaatgtgtctcctgatatttccggtacagagggccgtcttcctcctgcacaaaaagtgtcagctcatattcattgatctgctgttcccggtcataataattatcccagataaaactgcactcttcccggtcttcggctatgatcctgctgccgagtatctccctgtatttatattctgtattaaagtcaaagagaaagataccgtgcggatccagatagttgttgacgagccggaatacttcaagcagatcttccggatctgtgacgtagttgatggaatcacaggcgcttatcaccgcgcgcaccgtaccgtacagttcaaattcccgcatatcctgcagcagataaagtatggaatgcccgctcacagagcgcttgtccatggcgatctggagcatgtcctccgagttatcagccccgatcatatcatatccccggtcagccagaagttctgtcatgcttcccgtaccgcagcccagttccagcacgatgccttcctctatcccgtatttacttaagattcccactatatactccgcccattcttcataaggaacattgtccatgaacgtatcatagacctgagcaaaacttgtgtacgcttccatctctttcctcctttgtccgctgcgtcattttacaatggcacgtatataagtatatcacgcggccggcgttttataaagtagtgattccgacttccaataataacgaaggagaggaggatgtatcatccgcctctccttcgttattattatacagatccgttctattgcgccgcctctgtctctatgacgaacttcgtatttccgtccataccgtcccggataccgccgaacgacctgtagttctgtccgagcgtcatcatggcattgatcctggaggtcactccttcaatatcacctttaaatacttctgtcagcttatcgatgccgtccgctttgaactctgccattccatccgccagtgttcctgctccgtctgccagctgtccgacgcctgcccccatctggctgctgccctctttcaacttggaggtgccggtaatgagcaggctgctcttttcatttaaggccgccgccccctgctggagggctgccgccccgttgtacagatccgtcgtcccgtttacgaggtcgctgcctccggcgctgaggtcgccgagaccggactggagcgcagcggtgccctcccttagctttgctatccctgcctgaagggaaccggctccatttgccaatgcgctgacggtctgtttgaccgtgtccatacttcccagctgaccgttcactttatctgccacatttgtctttatggcgcttttgtatccttccgcaaggtcggccgtaaaggcagcctgatctgatatcagatccctggcgtccgccggcagcttattcacagcctcctgtgccagcgcgtttgcaagctgttccacctgaccgtcgcttatccctgtcgcggatgcgctttgtaattcgttattcagcttcgttaatcctccgctcagattatttattcctgcagtggccccgtccttcggcttatcgaaccccgccatcagcgcgtcggctcctgctttggcgtcattgatcccctgatgggccttcgccgctccgtttttgagcctttccgctccggcggccacctcactgcttcctcctgccagctggcttacgccgcctgcataagcgttgactccgtcggccagttcattgacgccgttttttaagtcgcctgtcttgctgttcagcgtattcactccgtcggccaatgtactgctcccatccttcagctgctctgcagcgccggacagttcgtcgatagaatctccgaagctttcaaaatcattgacatcactgaggccgaacttatccagcagatcagaagatacgactgtgatcgtcgtccctgcggacgcctttttgacatccgctgtgatcgtcacactctcaggtaactttacattgacatcctggaggccgagattttccgtaagacccgggaacccgagtccaagtacgatatctttatctgcgtcggatactatttttccgctgtcaaccgtgacatttttatattcatccgtcggcagcataagcgccgtcaccatcgtgaatggagtgtacatctctacgtctttgccgtccacctgtacggtctgtctggaatggttcttatagtcaatgtgtatcgtaagcttaccggacttccctttcagcttttccgccggtattttctttccgtccagcttatacgttatatttacttccaccggcagggcttcctccgatttaccctgatagtatatatcgtttccttctgcctcccatatgacactttctttgcccttctgggaaaatgtctcgtcgccttttacatttttgatgtctttcagaccggagatatcctcaaaggagccgctgcccgggtttttgagccattcgctcaccgtcgtgtccgtgacctttccggaagcgtccgctttcacatatacggtctcgtctttatacacgccgtctgtcttcgtgtctgtatctccgagcgcttccgctgccgcctccttaagtgtctctacatccttatccgccgctttgacatccgccgcggccatattgtgccagcaggagacgcctgccatggagacagccatcacaagagccatacttcctgccatgatcttattctttctactctttctcattatagatacctccctgattattctgcctcttccggcaggaatcctttacttgttttacagatcagtttgtcaaataccatgaacatcgccggcagtacgcagatgacgacgaccgtgctgatgatcgctccccgggacaacagtgtgcagagcgaactgatcatatcgatcttggagtacagtcccacgccgaacgtggcggcaaagaagctgacgccgctgatcaggatcgacttcatggacgactggtgggccaggctgatcgcctccttcttggagcggccgcggcttcgttccctctggtaacggctcgtcatcagtatggcatagtccactgtggagccaagctgtactgttccgatcacgatgctcgccacgaacggaagctctgtccctgtatagaacgggaccgccatattgacgcagatggcaaactcgatgatcgccacgagtatcaccggcagtgataaggacttaaatacaatacagatgataataaagatcgcaatgacagagatcacatttacatttctcatatcgctgtccgctatcaccgtcaggtcctttgtcagcggcgcctccccgatcaccatagattccttgttataactctttactattttgtcgatcgatttcacctgttcgttcacctcatcggttgcggtcttgtaatccgaacagataaactgtatctcataattgtcactttgaagctttgattttacggccggcggtataaaatcttccggcacggacgggccgatcacagactccatgccgatggcccacttcacgccgtccacagcttcaatctgctccatcatctttgctttttccttctggtccatctcatcatttttcagcatgaccatatatacgttgttcatgtgaaaatcttcatccagctttttattggcgaccgaacttttcagagtgtccggaagccccttatcgatattgtaatatacgtcggtgtgcgcattgccgtagatggccggtatgagcaggatgagaaaggctgccagccatactttgttgtgccgcgtgataaacgcggacagcctgccaaggtccggcaggatcggtttatgcgtcgtcctgtcgatccatttgtcaaatgtaagcacaagggcgggcagcagcgtcacacagcacacgactccgatggccacaccttttgccattacgatcccgatatttgttcccagcttaaatgtcatgaagcaaagcgccacaaatccggcaatggtcgtcacagaacttccgaccaccgacttgaaggtgttggaaatggcatgtgccatggcgcggttccgctctcccgggaatctctttttattttcctcataactgttcagcaggaagatggaataatccagcgtcaccccaagctgaagcaccgcggcaagcgcctttgtaatgtatgacacatcggacaggaacatattcgttcccatattataaagaatggcgataccgatgctgagcataaatatgaacggcgttatccacgaatccatcgtaagcgaaaggatgatcagacatagtatgaccgcgatcagcacgtatatcggcatctcactgagcgccagagacttgatgtccgtaacgacgcccgacatgccgctcacgaaacagtgcttcgcgctgatcttccgaagctgcgtcaccgcgtccatcgtctcatccgaagaagtcgtattgtcaaacagcgccacgagcatggtagagtctccgttttggaacaccttttcgtacttggacgggatcatctccatcggaacgctgatatccatgaggtcgtcataccagatgacatccgccacatggtccactgatttcatctcttccttcagcgccactacatccttttcatccatcccctccacgatgaccatggaaaatgctcccatcccgaattcgtccaccagggtgtcctgcccttttacggtctcaagactgcccggaagatagctgagtacgtcatagttgatcctcgtcatattcattccgatgatagacggaatgatcagaagtaatcccagaaccaaaatgatattcttatgttttgcgatccatttaccgattttcaccatcatgttgttttcatcctcccgtctgcacaataatgaccattagtcatttaactcagttgacactatacaccaaaaatgaccattagtcaatacttattttgacttttggtcatttttctgttatactatgtgaaactactgaaaattgtgaacggaacaagtacatttaatagttatgtggagcagggagagcgtattatgggtaaagtcgacgagaataaaaagaagaaaaaagaagcattgtttaacactgcttacgagttgtttgtcacaaaggggatcaacgggacttccatatcagatatcgtggaaaaagccggtgtggctaaaggtacgttttatctttattttaaagacaagtatgatgtgaaaaataagctcatagcccacaagacccacgaactctttacaaaagcaggggcagcgatggaggaagccggtgtggcagggcttgaagaacagctcatatttattattgaccatattgtaaatgagctggtggacaacaaggcgctcctcaactttatatccaaaaatcttgtcatgggcgccctccgctcggcgctgctcaccggggagagctccgacgccgtattctacgataagtatatgatgctgcttgagaacgattcccacacttacacggacgaggacgtaatgctgttcactatcgtggaactggcaggatctacctgttacaattccatcttgtttgaagagccgcttcccatcggacagtataagccgtttctgtaccggaccgtgcggctcatcattcagagccaccggaccacataagagaagaaaaggggacgctgctttcatgataaagcagcgtcccctgtcccgttctaacagatctggcagatccacccttcgggcgcttcgatctgtcccatctggatccccgtcaatgtgtcatacagtttctttgtaattggtcccatctcgtccattccgctttggaagcagatatccctgccgtggtcaacgacttttcctaccggtgagatcacggccgctgttccgcagagcccgcattctgcaaagtctctcacctcgtcgagatatacttctctttcctccacttcaagccccagatacttctccgccacatataagagcgaacgccttgtgatcgacggaaggatcgtgtcagacttcggtgttacgactttattgtcctttgtcacaaatataaaattagctcctccggtctcttccacctttgtccttgtggcagcatcgagatacatattttcgtcgtaaccttcttcatgcgcgctcatgatcgcatgaaggctcatggcatagttaaggcctgccttgatatgtcctgtcccgtgcggcgcggccctgtcaaagtcgcacacgcggatcgtgatcggctttgctccccctttgaaatacggtccgaccggggtagaaaaaacccggaactgatattcgtcggccggttttactccaatgaccgggttggagccgaacatatacggtctgatatacagcgtagcgcctgagccgtatggaggcacataagcggcattggcctccacgacctgcttcaccgcctccacaaaccggtcttccggaaatgccggcatttccagtctcctggcggaatcgaccatccgctttgcgttcagatccgggcggaaggtgacgatgtgtccgtcttctgtcgtataggctttcatcccttcaaagatcgtctgcgcgtactggagaactccagcgcactcatttatgaccacattggcgtcggaagtcagcgtaccttcatcccacgccccgtctttgtagttggaaacgtatcttttttctgtcgggatatatccaaatcccagattagaccagtcaatatttttcttatccatgttttcattcctccgtactgacaaaactactgtttttctcttactaattataatactgcgccgctcaaaattcaagagtgcactctgtttttgcatctgcatattgctatctctccatcatgctgatggattctatcccgacacttccgcctctcacgacttctatgctctggaactcctctttcatcagtttgatgaccgcgtcgttctttgtggccgtctggacgaattccaggagcagactgtctttgccgtaatcgatgacctttgccttgaatgtctccgcgatctgaaacagttctaccttgtcttccggcgtacatttcctcaccttcacatacaggatctccttcattcttacaaagatatctgtgaagtctatgacctttataacttccacgagccggttcagctgctttttgatctgttcaaatgtctcgtcgtcgctgaccgtcgctattgtcattctggagacagtcgggtcttccgtcgtacccacggtgagactgtccatattataggattttccggaaaacagcccggaaattttcgagagaacacctacctgattctccacatatagcgatatccatcttttcttcataccagttccattactcatcgtcctctctcctttctaacagtccagaatcatatcttccagcgtcccgcccggctgtatcatcgggtataccaggtcttccggatctatggtaaattctatgatcaccggtgtcttcgtgctcttctttgcctcttcaaacgcagcttctatctcttccttcttcgtcacgcggatcccttttgccccgtagctttctgcaagctttataaagtcgggcgtatattccgggcatgccacctccccgcattttcctctgcaggccgcgcctgcccgcaggcatgtcatggaataccgctttccgtagaagagcttctgccactgccgcaccataccgagattattgttgttaaagatgcaggagatgaccggcagttcttccagtacagccgtcgccagttcctgtatgttcatctgcatgccgccgtcgcctgatatggagatgaccggaatgtccggattgcctatcttggcgccgatcgctcccggcagtccgtatcccatcgttccgagacctccggacataagcaggcgtttcttctgcgtcagttccacaaactgtgccgcaaacatctggtgctgccctacgtccgtcactataatggcctcgtcaaacatctcattcatcttctctataatatcctgtggcgtcatgatcggcttctgcttcatcgtcatcggatgactgctcttccactcgtttacttcgtccagccattcctttgtgccgcactccgtcacatattccagcatacgctcgacagcctctttcgcatccgccacgatcggcacgtctacctgcacgtttctggatatggccgccgtatcgatgtcaatatgtacgatctgcgcgtgaggagcaaaggaatggagcttcccggtgatgcggtcgttaaagcgggtgccgatggaaaacagaaggtcacattcattgaccgacatgtttgccgcatacgcgccgtgcatcccgacattccccacatagagcggatgatccgtcggtatggcgccccgccccatgaccgtcgtaatgaccggtacattcgtcttctcggccagctcggtgaatgcttcgtttgcccgggcgatattgatgccgcccccggccagaaaaacaggacgcttcgctttctcgagcatcttgatcgcccgcttcagctgtccgatatgcacatgtgtgttcggcttgtagccgcggatattcacctcttgcgggtattctgccgggccgagttcctccatcacatccttcggcaggtctaccagtaccgggccgggtcttccggtgcgcgcgatgtaaaacgcctctttgattatgcgccccaggtcttccctgtcccgcactgtgattccgtattttgtgatgcttctcgtgatgccgacaatgtctacttcctgaaatgcgtcatttccgatgagatgtcttgccacctgtccggtaaagcatacgagcggcacactgtcatagttggccgtcgcaagtccggttacgagattcgtcgcccccggtccacttgtgacaagacagacaccgactttaccggtggaccgtgcatatgcgtcggcctcgtggacgagcgccacttcctgtctcggcaggatgaccttcgtataatcctgtttatacaactcatcgctgatgtcgatcgtacacgcccccgggtatccgaacagggtatctacgccttcttctctcagcgcctttaccaataatttgtttccactgattctcttcataatctacctccttaatctcccggacgaaaaagaaacgccctaagccgtccggcttagggcgaatattacatccgtgttaccacctaatttcagagaactgcgctctctgcactcagccaatacaggagacgtttctctcatctccgatattgttccctgttaacgctgggaatgcgttgaagtctactgagacatcttattgtgtcctttcggttcactgctcaaaggctacttccataattccgtcacgaagattctcaccggccatcttctctctttgcatcaggggatcatgtactcctccttgtcatagcatttctcagataattaatgttattatagtagatttgcctcacagatgtcaactgatttccaaaattctttcgcaaatattttcccacgacaggtgcgtcatatccaccgcgccgtccattgcaaattccgcgcattcttttattttctctgcaagcccgcgctcaaacgactcgagcgactccggcactgcctcgtctgtattttgcatctgcggcaggggcacgtaaaagaccggcgctcccggcgcctgctccttaagccagtcctgaatgccggggaagtctgtcatgacgaccttgtctgcgcatgccagcgcctctatcaccgtaagcggcagaccgtcaaagaaagaaggcagcacaaagatgtcactttcattgtacaccgtggcaagttccttctgggacagcttcccgagtaattctactctgtacggcgcctcttctgccaggcgcactatttcgcggtactcttcttcatttccggcgcctcctgctagccggagaacgagagactctctgtcatacggcagatacctgaggctcctcaggagactcataacgcccttcttttccgctatctttccggcgaatacaaggcggagaatgccgtctctttggcgcaggccctccactttgcggaatatttcctggttatatccgctgcccgatatatgtattctgtccggcggcatccggtatatttgtaccacgccctccgcctgggctgtctgcggaacaaataccgcgtcgagtctgcggatctgctctgcgatatagccgcgcctgagcggattctttctcatctgccgaagatccgtattgtggcagaagccatagatcctctgtttagggaaatgctcccgcacgagcgcggtgagcagatacagatgatggcagaggatcagatccggcttaaattcctccaccgctcttctgaccacatccagaaacgcattctcaaactgctttgccatctcgtctgtcatatcacagtaacgcgtgcttttataaggcatctcatcagacatgcccgctatataaaatggaagcgctccgcttgaaaaatataccggatagaattccgttccttccgcaagctgaggctcatcgtccctgtatattccggccacgactgcctgtctgtgcccgcgggcggcaaatgtcctcacaagctccgtcagatagatcccgctccctgtactttccggcttctgagccgtaatgcttaaaatgttcatgataccctttcatatacggtaaatgcatattccagatcaaagtacgtctgttcctcactcgtcttcgtcattttccactgcggatcttcgtccaggttcgggaaatatgtgtccgcgtcatatgcatggtcgatgcgggttatatacgccctgtcacagtgcggaagaagctggcggtagatcgtctccccgccgatgacatagatgtcttcggaaggatattttttgagctcgcacagcatttcctcaagggagtgcacgagcacaataccgttcgtactgtatgctttgtcagtcgtcatcacaatgttcactctgtttttaagcggctggcctcccggaaagctctccagtgtcttgcgtcccatggccaccactttgccttttgtcgtttcccggaaaaacttcatatcctgcgggatgcttacgagcagtttattgcccgctcctatcgcccagttcttgtccactgctactatcaggttcatacgtcttcctccttataccgcaaccggaatatttttgatctgttcatgtgtattgtaatcgatcagcttcacatcgtcccgcgtaaattcataaaagtcttttatctccgggttcagccagaatacaggcgccggcagcggctcacgcgcgatcagctcttctatcatcgggatgtgcctgtcgtagatgtgcgcgtccgctatgacatgtacaaactctccggccttcatgccgcacacctgcgccagcatatgaagcaggacggaatactggcacacgttccagttgttggccgccagtacatcctgggagcgctggttcagaatcccgttcagcgtcagcctgtcactgcccttttccttcgtcacattaaaggtcatactgtatgcacacggatagagcgccatctcgtgcaggtcctggtgcacgtataagttcgtcatgatcctgcggctgtaaggattatgcttcaagtcataaataacacggtctatctggtcaaacatcccttctttatactgatgcttcacgcccatctgatacccgtaggccttgccgatggaaccgtcctcatccgcccagctgtcccagatatggctgtttagatcatggatgttgttggactttttctgccatatccagagaagttcatccgtacagctcttgatgcctgtccgccgaagtgtcagggccggaaattcttttgacaggtcatacctgttgacgacaccgaactttttgaccgtgtaggccggagttccgtcttcccacaccgggcgcaccttctcaccttttgtgtccgtaccgttatctatgatatctctgcacatatcgataaacactttatctgcataactcatgttttatacctcctgcgtgatctatcaactataataccatgatttcctccatctgtcatgaaaaaaagcaggcggtgcccgttatggggacctgcctgccgatgtaccggatatcctatgctgtttttacgctctgaagcactgtatccagcgcatttgcactgctgctgtgggagcgctctacccggatattataacgctctgcttctttcagcgcacagtggaccatcttgtgcgccacggtagaagtgaacaatataatcaaatccggctgccctatctgagtttttagatttccggacattcgggtaaatacctttgccttatatttgtgacgcctgcagatctgtttatactgctgctccatccgctcatttccgcctatgatcacaacactcatctatgccacgctcctttctgccagtctgtcttacaccgccgcggccagtgctttccctgcttcctcacatgccttcaccgccgagtcgtccggcgcttcattggcgataacgcccccgccgttgacaagcaccgctcccgcgtttttcatccgctcttcccatgtccgcatccattcgccgtctccccagccgtaggaaccgaacaggagcaccgtctttcccgccacattaccttccagcgcctggacaaaaggctccatctcgctttcttccagttcttctgctcccatggacgggcatccgagtgcaaacgccttttcatccgccagccggccggcgtccgctccgccgacactgcgcagatccgcctcctgccctgccgccttgattccggccgcaacagcctcagccatctgttctgtattccctgttccgctccaatatactaccggtatgctcattgttcatcctccttatactcgctcaatgctcctataccgccgcacatgcgatatctctgatatgcctgcccgccagaaactcattcactgcgctcgtctttgccttgtcataggcaagaaacatcatctgcgccttctcggcgtcaccgtacaccttccaatatccggtgatcagacagttcctgccgccgttgtctatgaatcctttcacatcctccagcggataatcaagaaacgcgccgatctcatggggaaacgctatgtcctccttagagtaacggcagaccctggcggaaagtctctgcaggatgccgtcgacatccgcctccccgccggcacatccatatccatataaagaaagaaattctctgatatccttccggttcagatacgccttaaaagcctcccgccggaagaaaaacacaagacatctgccctttctcactgtaagtattctatattcaattccggttcccgcaagcaccgtcctgagctcccggcagacctccttatccacattcgtgatacaggcaaccttgatcccctttaaaaacggggcgcactgcagaataagctggaactgcagccgacgcttcacatcctcgaccgacagcatataagatacaacttcaatgggcataatgtgatcctttctttaaatgtttgatgtgctttattgattttgattatcatttacattaacaaatatatcataaccgtttttatatggcaagtataatgtgattattgatagtcttttctcaacaaactctgattatacaaaaagggacagggcaaaagcgaattggggacggaggttttttaaaaaaccaccgaccccaattcgcttttgccctgtccctttttgaaacctccggatcttgaaatctatggatctgatatattataaagcacttttccaagcattctctgcagcgcctctacttcttttttcgtcatgccgatcgtaagctttttgtctatttttttccggtccgcctccatcctccgctggatgtcgtatgccttttccgtcaggtagacgatcttgcaccgcttatctttattgctcggcacgataagtatgaatcctttttcatccagtcttttcagaagtcccgtcaccgtcggattcttgagactcagcgctttctcgatatctctctggttcacttcttctttcctgctggaaaaaaggtaatccagcaccgcgcactgggacgcagtgatgccaagcgtccggagcaaattattaaattctttctcatatacattatttatctgcttaaacacgaaacctaccggtaatctttcctgcatgccgccacctttatcctctgtatcacaacagtaccatatatagcatgctatattcccggcaaaatgtcaagccatgcggtcgcatctcctgacttacattacctgcgtccagatccacgaaaagggcatgacaagcgccatcgcaggcagcatattggcgatgggaaactgctttatcccggcgatccggaagccggtggccagcatcagcactcctccgcatgccgtaaaatctgccagcatcgtgtctgtcgtcagcggcatgataagtcctgcgcacaggtaaagcagcatgagtatgacaaactgcggaaccgccacgagtgaaacaataaacccaaggcttgcggcaaatatggccgccgtgaacaaatcaagtatggccttggatatgagtatcgtatgatcccctgtgataccggactgcagcgccccgaagattccggttccgctggcacagaataacacaacgatactgataaattctgccataaacgtatccctgctgtcctttgtatctgtcttcatgatcctggccaccggcgcctgcactttctccgccgctttcgcgatccccttctccaggtgcagaagttcaccggctactgtcccgaggatgacggcaaatataactgccggcatctgctccatctttatgatacttgtgatcccaagcgtcatactgcacacgccaaatacgagcgtcagtgtactgcacaggttcttgtcgagccgcttcccgagaaacgcccccgctatgcctcccgcaaatacacatatactgtccacgatcactccaaccggcatctttcattctcctcctttgttttcctgtctatctgttccgctacgcggcagcagggcaaatgtccggctgccgccgtaacatttaccctgcactttcactttccggacgtccccgcccgcttctttcaaactacctgttacttcgcaacgctcccctgtcccgcaaacagatgcgctctggagagcaccttcgccaccgcataaaacaggaccacctctatcggcatcataatgatctgcttcacgatcctggccgggaaaagcgccacaaacgtattgccgtagagcagggtgagccagtatgtattcagaagcagattgatgagcaccgtcacaagtccgttggcgacaatgatccgcctgatactgagcggccttttatacaatacgattccgtatatgaggccgcctaagaatccgcttatggtaaaaccggggaaaaacggccccgtaggcttcacgagatactttacaagatccgcaaggcctcccatgacgctcccgactaccggcccgaacatcataccggtcagttcattggcaatgtacgcaaaaccgatcttgatatagtcggtcagctggagcgtgtaaaatccaagcacgaccgcgatcgccagcagcatggccgtcatggccagggtctttaagcttctcaactcgtgaaaggagtctgtgaacagtgacttgatttttttcataaaaaatacctcctttgcagtagttttccttaaagctacgcacagcaggtatcttctgtctatgtgtagcagcgggatgcgagatatgtaccgcaagcttccaggcttttcgtcctgccggcaactccccgtccggctggcacttaacgcacacatctctactctgcttttctatttaatttttactatatcattctagcacattctccttagcagggcaatggttaaacttcttaagctcacggtacgcatatacgatcgccaccgccgccgctgccgcatctgctatgggccccgcatacatgacgccgtcgatccccataaacagcgggaaaatgacgatcaatggcagcaggaatatgacctgtctcgtgagagataccacgatcccaagcttcgcctttccgatggatgtaaagaaaccggatgacatcggctgcagtccgtttacaaatgtcataaacataaagatacggaaataccgctctgcaaaatggaaatattcctcactcccgcttccgaatatgctgacgagctgtctcggaaatatctggaacccgacaaagaaaaggatccctaccgcaagggagatcaccgctgctttcttatatgtctccttcactctgccaaaatttccggcgccgtagttaaatccccaaataggctggcacccctgtgagataccgatacagatggccataaagaccatgtttactttggagataaccccaacgcaggcaagcggaatatccgtgccgtacatcgaagacgccccatagtggcgcagcgtattgttcatcgtgatctgtacgacggccatggcgatctgattgatacaggatgccatgccaagcgacgcgatcgctttgagataagagcctttcggccgcagcagggaagccgacagctccatatgccgaaacctggcaaaatagatgatcaccataagcccggagattatctggccaatgatcgtcgcccacgccgcacctttgatcccccagtgaaacccgaagataaaaagcgggtcaagtattgtgttgatgatcgcaccggtcagcatacacgtcatggaatacgtcggactgcggtccgcccggatcagatgattgccgcccgtcgtcagcacgagaaacgggatcccaaatgccgttatccctgtataatcctgggcatatggcagaacatccggcgtgacaccgaacagatgcagcagcggatcaagaaacagaagcactatgaccgcgatgagcactccgctcaccgcgagcacagataagcctgtccctgcgattcctgccgcacgttctgtattgcccgcccccgattcgagattaaaattagaagcgctcccgatgccgagcagaagcgctgtcgccgtacagatgatggacaccggaaatgcgatattcgtcgccgcatttccaagcatgccgactccctgtccgataaatatctggtctacaatattataaagcgaactgacaagcatgcttatgattgccggtatcgcaaatttcgctattagtctgcctactttctctgtagccagaggattctgtttttctaacctttccatatttcacctgtcatttctaatactcacggatcatactgctgatttcccgtgttgtctccatatccttcaaatgttccaaagcatcctgcatatgatattccttcaccgcttctgtcactatgacaagttctgccgtcccgtctgtgatgatcttctgcacgaccttggaaatgctcaccttgtgaacaccaaacacactggcgatagcagccagcactcccggcttattgtccacctgcatgcggagaaagaacttgttcttcacatcgtcaaagcgcttgatcggtgtcttccggtagcatgtacagctgatcctgcccgtacagtgatactggatatctctcgccacatcgatgacatcccccatgatagcgctcgcagtcggaaattctcccgcgcctcttccatagaacatggcatcatccactgcatcgccgtggacaaagactgcgttgaaggaatctctcactgatgccagcggatggtcctttggaagcagcatcggatagacacctacttcaatgccgtcctctgtattatgtgcaactccgagcagcttgatcacactgccgaattcccgggcatactgaatgtccctcgctgttattccggtgatcccttccgtatatacatcagggaacacaactctggaatgaaaagcaatggatgccatgatggccactttgcgtcccgcgtcgagcccctggatatcagccgtaggatccgcctccgcatagcccagctccgtggctttagcgagcgcctccttaaagtccataccgtcctcaaacattttcgtcaaaatatagttggtcgtgccgtttacgattccgatcacttcatcgatctcattggacgcaaggcactgttttaaaggacggatgatcgggatccctcccgcaaccgccgcctcaaacaggaaatccaccccattgttctccgccgcatcaagcagctcttttccgtactccgccaccaggtctttgttggctgtcacaacattttttccggaattcagcgcctcaaggatcatcgttctggccggttcaatgccgcccatcacttctatcacgatctctatctcatcattgtctatgatatccgtccatttgtcggtcagcaacgacatatctacgccttcccgcttcttatccatattatgtacaagaattttctcaatacacagactggcgccgaccttgtgcaccatctccttctgctgtctctccaccagcttatatacaccgcttccgactgttccaagcccgagcagtcctgcctttatcgttcttttctccgtcataactctcacctgtccgttcttttttgctttattctctacaattacgtcatgttataaagtataacataatcaaaccgcaacttccagtaagctactgccattgattaaagcttagaatttcctccaggctcttcctgttctttttccgcggtgctccctctctggccggatgaccaaccgttatgatgaggcgcacaatcctctctgccggaatagcaaacgccttgtgcagcttctcctggctcatcgtcccgatcatgcacgtgccgagtccgatggacgcagcctcacagcagagggccatagccgccatgccgatatccatctgcgcaaaatgctgggatccatagtgctcgccgacaccgggcataagatgcgcctcatcctcacagatcaatataaatgccggcactttatctccccacgggcaaccggtcagctctccatcataaagcgcctccgtcaccttcctgcgcgcctcaggttcatcgactatgataaaacgccacggctgggcattgcagccgctgggagacagccgcgccacatccaccaggcggatcagcatctctctggaaaccggttcttcactgtagatcctgcagctttccctcttcaattgcatatccataaattccataactaactcctttctgccacgaatttgataatataaactgtattttaagaaaaaaaagaacaggcataacctgttccgtgagagcgacagacgggattcgaacccgcgaccccgaccttggcaaggtcgtactctaccaactgagccactgtcgcatatgttgtgtttttgttcctcagaacaataactaatatactatatactctcctaattgtcaacaccttttttgggattttttccatttttatttctcccggctttcatcacaatcttgctgtgagggacggaccctcgtccgcccccccttattcactactttccagcttttatctccgctgaatcaagatttatttttatgccttcctctctgagcacgttcctgattttcttaaaaagttccagcacgtcattttcatgcttcatattctttttgtactttttataatatgtatagtcttttgctttcatctttttaagattgttatgtctgatattccaggcagtcaccatgcgcccccggaagatgaagaagctgccccttccgatgctgaagccgttgtcaagtgtctccggaaggttccggatgacaaactgactgtccttcatgattttcttaagcttctttaagctcctgccgctgagcctggagtacctgactgcctctttgccttttcctccggcatacgcctcatagcgtactgtaccgtccacttccaccgtaagcgagaacccggcgctgccgctttcaaacgcgccggacgacggggccatgcggtacccgaacagcactttgccgcttatctccggctgtccattcaccatctccggtttagcgcacggttcttctgcttctttggctgatgcgtcagcgacagttatctcttcggtttccattatggatggaggcgattcctccgtcagtacggcaccttctcgtcttatttcaaagtcaggctcatccggcccggaatcaatcacatctgcggccatctgcatctccatcagtgccttctcttctctgtcgaacttattccagagtaggtgatagatgatcaatatgatcaaaatgagaccaagttctatcagtgcaaaaggactctgtaaaaactgaacaatcttacccgcatacggaatatggaaaatgtatgttccaagtatatcttcccggtacgttttgtaatcgtcatagcggtcggcattttccgcctgtgtatagtaccgctctttccctgtctcatctgcctctttcttcttaaaataatgggtgaaaatcacatcatcaccaagccggtctacatggaaagatataatcgtgtccggaggaatgtcttctccttcctccacatctttgctgactacaagcgacccaaccggtatcgttggctccatactgtctgtcaggatcacaaatgtctgatatccgactatattcttaagctgttccgggaaaaaacgcataccgatgatgtaggccagaaggactacagcaataaaagcaaatataaaatttcctgcaaatttaacgatttttttcaatatgtttctcccggataaacttatcaataagagataccatcactgatggtatctcttagaaaatataaattattttaatctttgtctcttactttacagcacttaattctcccgttatttcaacagttaattctttaccgcctaaattatttgttttagctgaatcctttggcgtaaccttcacattatattcattatctccattagtgattcccgtagcgacaccgcctgctatcgctgttccgtctttcttctcatatgtcacatcaaaatcactgctgacatcacttgctccatcttttatctgcgtactaagcgtaatttttcctgttgtaagttttgacgtatctacatttgccacgttaaaagtagctgccccttcatataccggataatcaccactattcgtctccgcaaaatttgccagtgccgctgttgtagttatcggattcgccaatgtaagcttattgcttgtggtagccgtcagcgtatcccacaccgcaaatgatccgaccgtcgtagccacgatcgccgcggctgtcaataaacctaatatctttttctttcctaatttctgcatatgtatttcctcctcaatgatagtacagattttcttaacctgtgtatattataacgaatgaaatacattttgaataatgcttctttctcattcctccgcgataaataaaaggcatcacaaacactaccgcttcagtccgcgtaattctccatgagaatatcgagaaaccctctcgcctgaacggaaagaatctcttttttgcgcttgatccacatgagttttttccccacgccgcaattattgagcataagactgtcaatatgccccttcttaagctcgtcgatctgccatttgccgccgaagataaacgcatcggttcgtttgatcatactgacaatggcgtgataattatttatgactatcgtgcgcttaaaatccatcacccggatatctccaagcgtgacaacccggtttatatttgaaaaataatcataaggcagatgcacatacgtgtgctgcaggagttcttcgggttcaatgcatccgcgcccgtatagcggactgttgccgccgacgtgtacgtaaagcgggcttgaagcgatctcatgcacttccagccctttgatctccaaaatcttgttcagcgcaggacactgctctgtgttcacggcaatgatacctatctccgcctccagctttgacacatttacaagcactttttcaatcgaagtctcatatatggaaatgttggcatgccgcgtccgcagattctcatagaaatccagcattatctcatctttcaaaataatatttccaacagacaagtcgagtctgttctgcatgaactccttgtccttgagtttcagcgcgtcgatctcattcagctgattgatgacagactgggcataataatacaggctttctcctgtcgttgtgaggctcactccgtggttggaacgcacgagcagcctcgtccccatctcgtcctccagattctgcatggccctcgtaaggttcggctgggtcacgtacagccggtccgcggccttacgcatgcttttttgttcggctatctctacaaaatattttaaatgtttcagctccatacgattacctgaacgttattcctgaacagttacggaaagtcccagctcctcgagctgcttctcttccacagcggtcggcgcctctgtcatcaggtctgaggcatcctttaccttcgggaacgcgatgacgtcacggatactgtcctccttcgccataagcatgaccatacggtcgagaccataggcaagtcctgcatgagggggcactccgtatttaaacgcgttcagcagaaagccgaactgctcctgcgctttttccggcgtaaagccgagtacctcaaacatcttgttctgcacgtcctgatgatagatcctgacgcttccgccgccgatttcatttccgttcagcacaatgtcataagcctttgcccgcactctgcccgggtcagtgtcaatatattccaggtcctcctccatcggcatcgtgaacggatggtgcatggctgtataacgttcctgctcctcattccactcaagcagcggaaattctgtcacccagaggaacttatactcgctcttgtcgagaagctccatctgacgcgccagttcgagacgcagattgccgagcacatcccaaacgactttatttttatctgccgcaaagagaagcaggtcgccgttctctccgcccatagcctcgatcagccccgacatctcctcttccttcatgaatttcgcgaaagaagacttcaccgaaccgtcttcctgtaccgcaatataggcaagtccctttgccccgaaatctctggcaaaatccaccagcttgtcgatcttcttgcggggcatgccgccctgtccttttgcgttgatcccccgcacggtaccgccattttctatggcgcctttgaacacggcgaactcacagtccttcaccacatccgtcacatctgtaagctccatgccaaaacgcgtatccggcttgtccgagccgtacctgtccatggcttcctgccatgtcattcttggaatcggaagcacaacttccacgccaagtacgtccttgaagagctttgcgagcagcctttcattcacatcgatgacatcgtccacgtccacaaaggaaagctccatgtcgatctgtgtaaattccggctgcctgtccgcccgcaggtcctcatcgcggaaacattttgcgatctgaaaataccggtcatacccggaacacatgagcagctgcttaaaaagctgcggagactgcggcagagcatagaaatgcccctggtggatacggcttggcacaaggtaatctctcgccccttccggcgtgctcccgatcaatataggcgtctctatctcaaggaagccttcttccgccagaaactggcgggtgagcgtagccacctggcttctcatgatcatattcttctgaagatccggtcttctcagatcaaggtagcggtatttcagccgcacttcctcttttgttttggagttctcctcgatcggaaacggcggtgtctcggactcggacaaaatacgcagctgtgacggaatgatctcaatatctcctgtggagagattttcatttaccgcgccggagcgcttcttaacctcccctgtgaccgccactacaaattccgcgcgcagcttcgccgccttctcgataaggccggagtctgtgctgccttcctcaaacacgatctgtatgatgcctgaacggtctctcacatcaataaatacgagccctcctttattgcggttcttctgcacccagcccatcaccgtcacagtctgtcccgcatttgcgccggacagttcaccgcagcggtgtgttctctttattccctgcattgattctgccataatctcattctccttatattcttttgaattataaactgccgatggaatcgcagtagcactcgatgatctgtgtgtatccttccgactccagctgttctttctgaaatttcttattctttttcatattagcgatcataacctgaaggccgttttcacggtcagccctggcaaggctgagcactctgagcattccctccggggaaagctttttctccagcagatatgctttcttcgcgccctttccgggcacttcataaccattttccagaagcagcatcacaatacgctcaaatccgatggaaaagccgcaggccggcgtatcctggccggtaaatctgcctatcatcttatcatatcttccgcccccggccacagagccgccgaactcatccatcgtcacttcaaagatagttcctgtataatacgactggcccctcacaagggtcggatcgaacttcatctgaaaatctgcttcttttgccgcctctacacttgaaatgataagctccatcccgtctgcggtctccgcaggaagatgcgctccgagcttctccctcaggtagccgatcccctccacgcccggggatatctcatcgaacagcttaagatatgtgtccacattctcttttgcgtaaccaagctcctgcagttccgcagacactccctcgcttccgatcttatccattttatccagaatgatgaacacttcatcgtaatcttcttctttaaaaccgctgtacgcggccattgctttcaaaatgttgcggtcgttgatacacaccgtaaagtttttaaggtcaagctttccgagcatggcggtcgtcgccagaataagctcgatctccgcgagattgctctgttcaccaagaatatcgatgtcacactgcataaactggcggaaccgtcctctctgcgggcggtcggcgcgccagacattgccgatctgcatcgccttaaacggggacggcagctcgtttgcatggtttgcgtaatatcttgcaagcggtacggtcaagtcataacgcagtcccccgtcgacgaggtcattttcttctttcgcgtcttctatcttaagcttctccccgcgctttaatattttaaatataagcttctcattgtctccgccctgtttactgcacagattttctatatgctccacacagggtgtctccatggaagaaaagccgtacgtcttatacgtctccttaatgagccagatgacatgatccctgatctccatttccttagggagcatgtccttcattccggtaaccggttttttctttaatgccataaccattctccttttcgttctatcatctcaccgatacgtgcgatataagcatcgatcgccttcacattctctatacgcaccagattcgtcttcttaccgtttttactgcccggcagttctgccgcctccttcagcacgatcttcgtggaagcccccgcccctgcggcaataatggattgtttttcctccataataagtatattgtatattcctgctttgtcaacctttgcatagccaacattttcaaaattacccgcaatattcttctggcggtaaagataatacggcagaaggcccatgcggcgcgcgctttcagccgccgcgcggatcatctccgtcatgacctgtgccattgtgccggtatctctctccagcgcttccacatagccccgggcgctctgctcctgtcccatctgtgcggcgcgcttgatggcaagcgaatgcaccgtcaggctgtccggcgccagggactcagcctggcggagcgtatcacgcatatccgcggcagactcacccggaagtcccgcgatcaggtccatgttgatattgtcgaacccggtctctcttgccagcgcgtaagtccggacaatatcctccactgtatggcggcgtccgatcaagtcaagagtcttctgctgcatactctgcggattaatggaaatccgcgtgatgcggtggcggtacagtacgctcagcttctcttttgtgatactgtcggggcgccccgcctccactgtgtattccaaaagatgttccctggaaaaattactgtctatacagtccagcagccgctccagctgacacgccgtcagcgtcgtcggcgtaccgccgccgatatacacggtgttcagcttcttcccggcggacactttgccgatgtaggccagttccttcataagggcgtccagatagtcttccaccctgtccttccacgccgcaagcgcgccggagctgaacgaacagtaagtacagacagaaggacagaagggtatccctacatagagactgtatccgtcttcatagtcgagctgctcaagcagcgccttctctctgcccgcgatctcccatgcaagctttgccttctctccgctcacaaaatactgctcctgaaatgagcggaggaactcctccatctgcgcgccgccctccagctccttcatggcgatcttagaaggccgcactccggtcagaaggccccacgcaagggagcggccggtgtaccgttccagcccggtgtaaatctccctgtccacacagcgttttctctcctgccggtctgcacagcggtccgccgcgcgctctgccaaaaggaccgtaccgtcaggcagcgtgacgcggaccgcgtccgcacaggtccggtcaacgctctgttccaccttttcagacggaaagaacgccttcgtgatatggtaaacattatatgtatacagttcatcactgcagatgatctcaatcataacctaacctcttcatgtctatagggacaggataaaatgcaattcgggacgtaaccctcccgcaaggtgttacgtcccttttttataacgtcccctttttatagaaatggattgtgacttttctcataaccgattgtcgtctcgcccatgtgacccggatatacgagcacgtcatccggcagcaccataagcttttctctgattcccctcaccagatccgacatgctgccgagcggaaagtccgtccttccgacagagctctgaaagagtgtatccccgctgaacaatactttctcagcctccgcataataacacacgcccccgggcgtatgtcccggcgtgtgcagcactttgaactcaaatcccgccgtcttaagcgtctcgttgtcctctatatatgtggcactgccaaacgtatagcccgacgtgtagacaccggactggttaagcccggggtccttaataagctgctcgtcgtctctgtgcagatataccggcacgtcatactccttcaggaagccgtccagacccatgatgtggtcgaaatgtccgtgtgtcagaaggacagcctctattttcagcccttcgctttttatatgccccatcaggtaagacgggcacgccgccggatcgatcacggctgtctgtcttgtctcttcattgaccgccagataacagttcgtactgatgatccccgtaacaaatttctctactttcatgtaatcctctctcacttagcctgttgttctctctatatccataacgccttccacctggcgcagcttctttactatcgtgtccagttcttcccttccgtgcacgataaagccggtctcgatcgtcgccgttccctgcttgctcgtgcgcacgttcatggacttcacatccaccgtcgcctcggtaaatatcttggacatctccatgagaagcccctgcctgtcatgcgcaaacatcttgatctccgccaggtactgtccgccgttctgctccgccacttcgctttcccactccgcgtcgatgagccggacacgctcgccctcggtcagatgtatcatattcacacagtctgtcctgtggatggacaatccccgcccgcgggtcacaaacccgacgatctcatctcccggaaccgggttgcagcatctggagaaacggaccgccatatcgtcgatccctttgacgacgataccgctctttgatttggcgatatgcactttgttcttggacgcttccgccacacgttccagtacgacttcgtcggtcatctcctgcttgtgttccttgccgtactcttctacaaggcggttcacgacctgtccttccttcagccctccgtgtccgatggccgccagcacagactcccagtctttaaagccgtatttcttctgcacgatctccatgtacctgttgatcatgatatcgctctgggtgatcgccttggctttacagtaggcggcgatcatctccttgccctttacgatattgctctccttgaattccttcttgaaccactggttgatcttgtttttcgcctgtgtgctctttacaatgcccagccagtcccggctcggccccttggaattctgggaagtcaggatctctatcctgtccccgttctgtatcttatagtctatattgaccagctttccgttgacgcgggctcctaccatcttattgccgaccgcactgtggatggcatatgcaaaatcgatcggcgtggagccgttcggaagattcttgacgtccccctgtggggtaaagcagtacacgtcctcggcaaacaagtccagatcgcctttgagcagatttaagaattccctgttgtcggacatgtctctctgccattcgaggatctgccgaagccagctcagcttctcctcttcctgcgcctgtacgctcttcttgccgtcattggattctttgtatttccagtgggcggcaataccatattccgccgtcttgtgcatttcctccgtacggatctgtatttcaaacggctgcccgaccgaactcataagcgtcgtgtgaagcgactggtacatattcggcttcggcattgcaatatagtctttaaaacgccccggtatcggcgtatacatctcgtggatcacaccgagcgcggcgtaacagtcctttacagaatctacgatgatccgcacggcaaacaggtcatatatctggtccaccgtcttctcctggttcaccatcttcttatatatgctgaagaaatgcttcacccggccgttgacgtctgcctttatgttggcgttcttcatatgtgtggacacttcatctacgatctgctgtacaaactcctcgcgctccgtcttcctcgaattgatctgattcacaagatcaaaaaacacttccggctgtgaatacttgagcgccagatcgtcaagttctgtcttgatcttggatataccgagtctctgggcgatcggagcatagatatccatcgtctcctttgccttttccttctgcttggccggcgtcataaactggagcgtccgcatgttgtgcagccggtccgcaagcttgatgataatgacccggatatcctttgccatggcaagaaacatctttcttagattttccgcctgtacttccagtttatccgaagaataagaaagccggccgagctttgtgaccccgtccaccagaagcgcaacttcttccccgaaattcttttttatctcttcttccgatacagatgtatcctccacgacatcgtggagcattcctgccgcgatcgtctccttatccatctccagattggccaggatgatggcgacccagagcggatggacaatgtacggctccccggacttgcggcactggtccccgtgcgctttcctggctgtctcatacgccttctctatcatggatacatccgttgaaggatggtacttccggatacgggcaattaacatgtcataaagctggtccggatcttcataatctccgggagccttcacggcgtgcccgtccacaatttccagtccctttgagatctcatccgcaatggattccggtgctatgcggttttctgactcatatatcattttctctgacatattaatgcctccttccttttcaaattttaattctgtcatttgcctggataagctatcacggattccacatcatatcccttcagccgctttcttccttccagaccggataattccataaggaatactgccttcaccactttgccgcccagcccttcaacgagcttaatcatagcctcattcgtcccgcctgtggcgatcaggtcatcgatgatgacgaccttctgcccttctttgaccgcatctctgtgtatctcaagctccgcggtcccgtactccagctcatattggatagagactgtctcacatggcagctttcctttctttctgatcggaataaacggtttatgcagattatatgcaatagggacaccaaagataaaccctctcgactccggacccacgaccacgtcaaattccacaccgtcaagcttttcctgcatcaggtcaacggcaagatgcagtccgtccgcatcctggagcacgctcgtgacatccctgaaaatgataccctgctccgggaagtccggaatactccttacatactcttctattggtttcatgacaccctctccattctctcatataaatacaaaaatagtataacattagtttatgtaattttcaaacaattctatacatctccgacagtttactggtaatgcgtgataacgatctgcattgtccggctccccatatactcatttacttccggataatacgtcacagacagtgtcattttgcttcttcgccggcccaggaactgtttcagcgcctctttgccgtattgttcctccagataggagcagaaccggccggtatcaccgaaataaacagcctcagtctcatttcccgccgcatccttcacacgcatcttcagcacatttctattctttccaaatatctgtccgccgagcagttccacctttctcgcggcaaataccggctttttatttccatttccgaaaggctccagatactttagctctctgacgatatcctctgtgacacaggagaacggcatctccatatcgatcactactttttcccgcatgtcgctttccttgagcgtacagttttcattcagccgcctgcgaaactgctccacattctctttctccagcgaaaacccggccgccatcatatgaccgccgtactttgtcaaaagctccctgcagcctgccagttcttcgtacatgtgataagcttcgatggaacgcccggaacctttcaccccgtcttccgcgtctgtcatgacgtatgccgggcggcagtagcgctcccgcagccttcccgccacgatgcccgccaggctttcatgacagtccggcaggtataccgccagcacccggtcctttccaagagacgtcgtctcgatcatctgtactgcctgctctaccgcggcggctgtcatctctttccggctgtcattcaatgcctttaagtctcccgccagtatgtccgcctcttttttacgttccgcacagagcaggtcaagcgcgcgcttcgctgtatccagtcttccgcccgcattcaaacacggtccgaggacgaaaccgatatggtaagagttcagcttttcccggtctatgccggtacactcaatgagagcgccaagtcccggatttaccgttcttctcagacgttccagcccttccctgacaaggatccggttctcatctaccagctccatcacatctcccactgtggcgaccgccacattttccaaaaggtcgtccagatcatccgcctcatttcccatagcctcgtacaacgtctctatgagcttgtaggcaactgccgccccgcacagtcccttgaacgggtagccgcagcctggctgcttcgggtcaatgaccgcgtcagcggcgggaagtatataattcttttcctccccctccgactcatatggcacctcatggtggtctgtcacaatgaccgtcatgccgagccgtttgccgtaggcgatctcctcactggccgcgattccgttatcacaggtcacgatcgtgtctatgccgtctctgtatgcccgttcgatcagttcaatgttcagcccgtagccgtcctttatccggtccggtatgtcactgtccgcacaagcccctgattttctcagacccttcagcagaatataagtggcgttcactccgtctatgtcgtagtctccaataatacggatcttcctgttttcttctatcttctcccggaggatctccaccgccttgtccatatccttcatgagcattccgtcatacaggtcggtgatcgttccgttcagataacggtccaccgcctccggcccgatcacatcccggtttctgatcaggcaggccagccttggactgatgccgaactttctccccagttcctcgaaatcagctccctttctgagcagtatccactgttccatatcttttcctccaccaaaacagccacagccatataaatatggccatggctgatatactgtgtttcttttgtctatctctttttctttgtttccgccgctttctttccgatctttgtcctcatgacataccagagcgcgccggtgatgcagacagaggaatacgcgccgcagataatacctaccatgagcggaagtgcgaactcccggatagagcttacgcccatcacgaacagtatggccaccatgacaaatgtcgtcagagaagtgtagatacttctcgtcagtgtctgtgtgatactcttgttcaccacgtccacaagctccgtcgtcttggatctcaggcgcagttcctcccggatacggtcaaagatgacgatcgtggcattgatcgagtaacctacgatcgtgagcatacacgcgataaatgtattgcccacagagattctggcaaccgcatagaaagtcagcacgacgagcacatcgtgcagcagcgcggtaaccgcacttgcggcaaagcggatatccttgaacctgaaccagatgtatatgagcatgaagatcgtggcgacgatcactgccatgatcgcatcctgcctcatctcgttactgatcgtggagctgatattctccgcggtaatgagcgactcatctactttaaatttgtcggcgagcgctttgttcagcgcctcgcgcacatccagtccaagcgttttcgtcttaatgatgacctgattagtatctgcaaccttctgtgtctggacattggcgtctccggtcacttcctcgacaacaggcacgatctctttgtctatctcttcgatcgtatagtctttgttaaacgtcacattcgtggaagtaccaccctcaaattccagactgtaggcaaacgctccttttccttttgagccattcacgcccatgaatacgaatccaagtatgacgaccgcaagcgacagggcaaaaaaacatttcttcctgccgaggaagtcgatgggctttctctcttttctcggacggtaatacagcttctctttccgaagtcccaccgcatagaacgcatacacgatcatccgtgtgatcacaagcgcggtaaacatggacacgataataccgatcgccagcgtctgtgcaaagccctttaccgaaccggaacctttgaaccagagtaccgccgcggcaatgagtgttgtcacattgccgtccacgatagcggacatggctttctgaaagcccgtcttaagagaattgcggacgctcttcccctttgacatctcttcccgcacgcgggcaaatataataacattggcatcgaccgccataccgatactcaggataatacccgcaatacccggcagcgtcagcgttacgttgaatgcatttaagatcacaagcaccagcccggtgtaaatgatcagggcaagactggatgcgaggcccggcagaagatacacgcatatcataaagagaaatacgatagccagaccgatggcccccgcctttaagcttgtgctgatcgcctgttctccaagctgcgcgccgaccacgttggaacgcagttcctccagttccagcttcagtccgccgatacggatggtggaggcaaggctctccgcctcttcatagctgaagttgcctgtaatataggcctgtccgccggtgatggctgtctgtacggtaggactgctgatcgtctccccgtcatagatgatggagatcggctttcctacatttgcttccgtcgcctcggcgaatttcttcgtcccctcttcgttcaggtcaagctctacgctgtattccttattgcccatatcgtcttcaccggcacgggccgaagcagtctttacatcagaacctgtgatcaccgtctcattgtcctgtgtctggaatacgagagaacccggctttccaagttcatccaggatcgcgttggcatcgcttacacccgggatctcgatattgatcctgtcatcgccctcctgatatacgttcgcttctgtgctgtactgctccacacgcttctgaagcttgtagatcgtatcccgcatctcttcttccgacgggttcttgtcttttacctggtaagtgatgctcacaccgcccgccaggtcaaggccgagcttaatgttttccgcagaaccggtcttgcctttaccgaatcctgccaccgttgtgaatgcgagcagtgctatgagagccgccgccacaacaagactaagtatgcctttactcttcttcatggtctacttcctttctcttatccttccaagtcttcctctgccagcgccgccttcatcatgatcgcgcactcaacacgcttgcgctgcatctcacagccgatctcatacgcttcatggatcgttccgtgaaaattataagcattcgccatacagccgccgctgcagtaaaattttgcaaaacaattcttacacttttctttggaatatacgttgcagcttctgaattcatctgcaatctccggtctgacgatcccttcctctacattccccataagaaattcttcctgccccacaaactggtggcacggataaaaatctccccacggggtcaccgccagatattccgtaccggaaccgcaccctgacaaacgctttgccacgcacggtccaccgtctaagtctatcataaaatggaagaaattaaaaccttttccttccttttcccggccgatcatgatctgcgcgagcctgtcgtattcctgcatgatcgccggaaggtcctcctcccggatcgcatacgggtctgtctcttcccccacgaccggttctatggacatctgtttgaatcccagatccgcaaaatgaaggatatcctccgcaaaatccagattattccttgtaaatgtccctcttatgtaatacttttcctgattccggctctcagccagtttctgaaacttcggcacaataagttcgtaactgccttttccgtttctgaacggccgcatccggtcgttgatctctttccgtccgtcgaggcttaaaacgacattgtccatttctctgttcacaaattcctgtatttcgtcatttaaaagtacaccgttcgtcgtcacagtgaaacggaaatgcttgtcgtggatcttctcctggctcctgccgtacgcgacaaggtccttcacgacctgccagttcatgagcggttcccctccgaagaaatccacttccagattatgtctgctgcccgaattggcgatgagaaaatccagcgcctttttcccgacttcatagctcatgagcgcgcgtcttccgtgatactctccttcttccgcaaagcagtacctgcaggccaggttgcagtcgtgtgcgatgtgcaggcagagcgcttttacgactgtctttctcttcttcacttcctcgatcaggtcttcatgcgtgtcgggcgtaaacagcctgcctgcttctgtcagttccgcggcatccgcaagcgcctccccgatatctgaactatcataagctccgccgaggtgttccctcagccgctcaggcagctccggtgcccggaggctttccgccgtccatgtatcacgttcccgatcaagctgctctatcacatcataacacagttcatctactacgtggaccgcaccgctgttcacatccagaactatattatatccattgtttttatactggtgaatcaaactgtatatccccctttttcaaacaacaagaaacagcgacccttaagaccgctgtcccgagtattctgtatgatgtttcattatttcttctgttcgcaggtctggtttcctactgtacaggaagtcttacatgctgactggcaggatgtctggcattctccgcatccgccctttttaactgtatgattcaaagtctgtgtatttaatgtcttcacatgtttcatgtcaatatcctccttacgtttgcttaacttttgttattataacataagcaatatgtttttggaagtatttttctcgctgtttttcatgaaatcattccgcccaccatacctccgccggcgcataaaataaacgtcgttatgaggttcgcgccgtttccgttcagcgtatggtataccccgagcgtaatcagaagcagaagtgcaaaatatccgatccccaggcccaatccccacacaaacctgcgcaccctggcaagcttaccgataatgatgcccccgactagagtggccatgacatagatagccacgatacctgccgataccgctttttcattcaaatccatcttataaagcagcaccgtcagcacaagcagcatgatcccggtaataatataagaagcaagcagtgactttaacacccacatgacttttgaatctttctgaatccgtctctccatctaatccctcctcgtctatcacaaggtatgaatcagattgtggatttatgccattattgttccatctgcctgcctaaaaatcccgccgcgcaggctgccatcttctgttccagttctgaaaacttctttttactctcttttgtaaggaagatcacgcctccgatgacgtcgccctcacatacgatcggatgaatgacctggtaatgatattcatcatcctggtcattgatcgtcttcatgaacttcttgtccccggccgccgccagaatcggatttctctcctccagcgccttctccagctgcttgctgatgtatttatcctgaaaatccttcttgcctccgccggcggaagctacgatctggtccatatcactgacacatacaaggcagcccatcgtctgggccaggctttccgcatattgtctcgcaaaagcggacagttcgcctatcggagaatactttttcagaatgatctctccttccctgtctgtaaatatctccagcggatctccttcgcgtattcttaatgtcctccgtatttctttgggaatcaccactcttcccaggtcatcgatccttctcactattccagttgctttcatgtcctttattccctccatttatcttgattggcagataaatgtattatctgttaaaagaaggaaaatcatacatgcgccgcaacaataataaatacggaaccgcctcctgatgtacaagatacagtcttgaaaatacagtctcagtatactattatattttatagaatcacaaaaaaaatcaaacggaggaatcatcatgagtaaaatcgaagaagtaagaagcgacatgataggggccatgaaagcaggcgataaggagacaaaggaaacgctgtccatgctgctggcggctcttaagaataaagccatcgacaagcgttccgacctgacggaagaagaagagacacaggtcatcttaaaagagatcaaacagacaaaagaaacactggagatgacccccgcagaccggaccgagatcatagaagaatgcacaaaacgcctgtccgtactggaaagctacgccccgaaaatgatggatgaagcagagatccgcgagatcaccgccgccacactaaaagaactcgggatagaaaccccagccgcaaaagacaaaggcagaatcatgaaaacactcatgccaaaagtaaaaggcaaagcagacggcaaactagtcaacgacattgtcggaagctttttcaaataagaggacgggtgcacagccctgtgcacccgtcctcttaccgttcaccgccggtcataaaatatcccctgcaaaattcctctttactccgcctggtcgtctgtcttagccccgtcggaatatggttcttcgctgctctgcttgatcgtaacgctcaggtcgttgaaatccacttttctccagactcccttgttcaccttcacgcctgctttcttgatccatttgtcacacgtatcgttataaagctttgtctttctctcctgaacaatgctttcctttttggagtccgtcgcctctctgtcgagcaggctcgtcaccttcgccacataacagccgctgtctgtctcaatgacgccggtcacttctccctctccgagcgcgtccgccgctttcacgacatcctcagccggactcgtcgattcactgtcaaacgtggccgtctgtgcctccacgccctgttctgtcgcaagcgcgctgaaatcatctgccgtgccggcgctttctgcaaagctcccggcctttttctttgcctcggccttctcttcgtctgaaaggtctgaagactttccggaatcatcggtcgttttataagggaacagtacgtactgcatactcttctgagccgcctcgtcgtcagacacctctgtgtccgctccggcctctatcgcttcagccatcttcttttggaccgccatcagcgtaaggacacgctttaccgtctttctggaaccggaaatcttttccttggattccagagtattggcttcatcaaaggccttggctgacttttcgatcaccgccttctcttcctctgtaagggacacatcataatcacccatatgctcttccaggacgatcatcttctccagctcattaagtacagaatccttgacaaattcttcgtatgtctcccccttcgatgcgtcagtattccacatatcatctccgagatagccggaatagtaagtttcatactgcgcctgtgtatatcttgcaaaaaaattcgcgacatcggctgtgatctctttttctcccacagtcgccaccacgtcattttcgtcgatggaaccgcatcctgtgaggacccctgccgcaagcagccccgttatcgcaaacagtaacactctctttttcatgtttttaaataccctccttagtactgctaatttcactattatatcccgtttttaagcgtcaatcaatccttttatcccaattaacacatttttcacaacctgcagaatatcctcgttcttttcctttttattcctgctccttttctcatacataaagtacggcggcgtatctgccttaaacatgagcacgcccttaaactcttccaggagatccgggatgcgctccggatgaacctttgccttctcatacatcacaaaggtgcaggtctctcctttttgttccacagccgtgacatacacactgtgagccagcgctttcagcctggccacgctcagcagcgtctccaccttcttcggtatatctccgaaccggtcgatgagctcttccaccatatcctccatctcatcttccgtctcgaccgctgcgatccgcttgtaaatatccagcttctgatactcattcgggatataggaatccgggataaacgcatctacatttaagtccatcgtagtcgtgtacgtctcttcttccatctcccctttgagatgcttcacagcctcattgagcatcttgcagtacaggtcatatcccactgcctccatatgtccgtgctgctgtgctccgagcaggtttcccgctcctctgatctccaggtcgcgcatggcgatcttaaacccggagccaagatctgtgaactcccggatagccgccagccgcttttccgccacctctttgagcatcttatccctccggtacagaaggaacgcgtacgccatcctgttggagcggccgacacggcccctcagctgatagagctgcgacagcccaagccggtccgcatcgtgtatgatcatcgtattgacatttgatatatccagtcctgtctcgatgatcgtggtagatacgagaacatctatctcaccgttgataaaatcatacatgatcttttccagctggtgttccttcatctgcccgtgcgcaaatgccacgctgacttccgggacgagcttctggatgcgggctgtgatctctgcgatatcctccacgcgattgtacacataatagacctgcccctggcgggaacactcccgctctattgcctcccgcaccatctcatcattatattccatcacataagtctgtatcggcatccggtcattcggcgcctcttccagtacgctcatatcccgtatgccgatcaggctcatgtggagtgtccgcgggatcggcgtggcggtgagtgtgagcacatccacattttctttcagcttctttatcttctctttatgctggacaccaaatctttgttcctcgtcaatgatgagaagtccgagatttttgaattccatgtcattgctcagcacgcggtgcgtccctattacaatgtcgacgaggcctctcttcgtatcctgggcggtcttcttctgctgcgcgggtgtgcggaaccggcacataaggtcgatcctcaccggaaagtcgcgcatacgctgtacaaaggtattataatgctgctgcgcaaggatcgtggtcggtacgagatatacaacctgcttatcctcctgcaccgccttgaaggcggccctgatcgcgatctctgtcttgccgtatccgacatccccgcagataagccggtccattatcctgcggctctgcatatcccgctttaccgcctcgatggcgagaagctggtcttccgtctcctcaaaaggaaacatttcttcaaactcctgctgccataccgtatcctccccgtacacatagccttcctgttcctgtctggccgcataaagcgccacgagatctcttgcgatctcttttaccgcgccgcggaccttttttttcgtctttgtccactcctgcgtcccgaggcggttcagcttcggcttcttcgcgtccgcgctcgcgtacttctggatcagatcgagctgagtggccggaatgtaaagatttcccccctttgcgtaggatatcttcatataatccttcgccactttgtccacttctatcttctctatcccctgatagataccgagaccgtggttttcatggacaacgtaatctcccggcttcagttctgaaaagctctgtatcttacggccttcgtacgactttcttttctttttcttctttactttaccgaaaatgtctgtctccgctatcacggtaaatttgagcatcgggtactcgtatccctccgccacatggccgtatgcggtcattatctctccggaggccacctcacggtccatctcatcgctgtagtaactgctcaggttataatcgcgcagatcttcagccagacgccttgccctcgttctggaaccggaaagcaatacgacccggtagccgttccgcttcagacgttttaaatcctgagtcagcatatcaaagctgctgttgtacggattcacgctcttcgtcatgaggcttacggacccgcggacgtccagtccccggctgcgcatctcaagcgcgaagaagccgatactgctgtagccgttcatccgtctgacgatctcatccgtatgatagagctgcgcctccgcatcggttatgtcatagccgctctccaggcggcgcttctgcgcttccaggaactcgtcttctacgccttttcccttttccagaagccgcaccggctcgtctaggaaaagaagggtgcgctcccgctcaaaataatcaagaaaggagaccctctgttctccttcctccggaaattcgctggccggatatatgaccacttcctccaggttctcgatggaacgctgtgtgccgacatcgaacgtacggatagaatccacctcgtccccccacagttctattctgaccggcagctcctccgtcagcggatatacgtccaggatcccgccccgcacggcaaactgtcccggtccttctatctgaacctcccggtcataaccgagtcctgcaagctccttctccatctttgaaaggtcgaccgcgctgtcgtttctcaccgttatcgtgcgcctctgaatctcttcttttggaagcagcgcgtccataaacccgtcgaaactcgtcactacggtcatagcctgcccggagatgaccgcctggatcacttccatcctctgcttcaccagttccctgctgcgcaggtctgcctgataaaacaacaggtcttttgccggatacaggtatgtattcgggtcaagaaaacggtattcttcgtatatctgttttgcttttgactcactggaacaggcgatgactttatagtgacagccatcgctcagcgcatacatcatatgagttttctgtgaattgacgcagccggatatctgaatcatcccgggcctgcccgtctttgtcttctgaagctcttcaaattccgccaattcttctaacggccttattaaggcttgcatatttagccctccttaggctttacttttctgttatactcattcatggcagcgtctatctcccccgccacgatcatttccacggcctctgccgcatgtccgtatccttcttccatcatctcccgctcttctctggaaaaatgcccgagcacataatctgccagatcgtaccgtttcggtttctcgccgactcccaccttgatgcgcggaaatatgtctgtcccaagacacgatataatgctctttatcccattgtgcccgccggcgctgccctttttgcgtatgcgcagctggcctgcgccgaggcttacatcgtcgtagatgacaagaagctgtgactcctcatccactttatagtaatccacaagtccccggatgctctcgccgctcaggttcatatacgtctgcggttttgccagaagcactttctgtccggcgatgatccccttgccgatataggccctgttcttccggtaatccacggaaatattatatttgcgggcgaccgtatctatgacatcaaatccaacgttatgtctcgttccttcgtactgtaatgtaggatttccaagtcctgcaataataaacattttctctcacctcattttcttcctattacattctacaagagggctttcattttgtcacgcaaaagccacgaataatttccggataaatctcatacattatagaaagtgaaaatacgatacacgacacaggagggctttatgagttctaaaacgaaaatagttgtattgcatatgaaagagattatatatacggcggtatttgccgtgttggcaatagtattgatcctattactggtatttatgttcctgcccaagagcaagagcgccggtatagacgaagaaaaatatgtccccggggtatatacatccactgtcacactgaacaatacggcgctggaagtggaagtatcggtagacgaatcccacattaactccgtgcgcttctccaatctggatgagacggtcaccaccatgttcccgctcatacagcctgcgatcgaagacattgcggaacaagtctacgacaagcagtctcttgatgacatccaatattccgaagataatccatatacctctcaacttatagtcaatgccatcgacgaagcattgaaaaaagccgcagttaccaaatagctgcggcttttctaatgtactgttctgctccggtcaaccttccactatgagatacctgccgcctggcagggcaaaaacctccgaagcctcttccagctcttctgctgacattccgtcaatgtcaagcccctcttcttcaaagaactcacgcacttcatcgattccgtttacaacgacggccatgcagtcctcaagaaatgcctccgcctcctccggcgttatggccaccggttcatcaaacagctgtgactgtttctccaaaaaaactctcagacaatcttcatcatactcatacatttctgatatcctcccttacagtgtcgttgttgtcttcttaaacatactgcagtaattcttccggcagatcaataatatgctctgctcctgcttctgccagaacctccctggaacggaatccccaagccactccgacacatgctatcttggcattgagggcggtctttacatccacttccgaatcgcctacgtacaggcattcgtctttccccctatgcagaatatcaagcacgttgtacacgccttccggatccggctttctctttatgccttccttctgccccagcacgcagtcaaagatatcttccccgaatatctcccgcactacttttacagtctgttcatggggcttattggacagcaccgcaagctgaatacccttttttctcaggcctgagatcatctgagggattccctcatacggtgttacatgatatgtacagttggcatcaaatatacgtccatatatttccatgccttcatcaattctgccggcatctttatctccggctgctgcaagtgcgcattccataaggcgtctggcgccatttccgacaaactgtctgcactcatccgctgtgatctcggcaagccccatctccctcagggttgcccgcaccgaatacgtcaaggattccagtgtatctgtcaatgttccgtctaaatcaaatatgcaggctttcatacattcttcctcctatgtacctaataatagtatgaacgtgtgcaaatttcaagccggaatttgatgatttgacggacagtgggagcaaaacgcggcagataaaatttatatccgccgcgcctcattaacatacacttacatatccctttatcacttagggtcagttctccagatactgcttcataacgcgcagtgcattcttctccagcctgcttacctgcgcctgggaaatgttgatctcttccgccacttccatctgcgtcttaccttcaaaaaaacgaagttttatgatataccgctcccgctctccgagatgttccatggcagcttccagcgacagatcttccacccatttttcttccttgttcttcgtgtcgcttatctggtccatgacgtacagagcgtcgccgccgtcgttgtacacaggttcctgcaggctcataggcacctgtatggcatcgagcgcaaatacgatatcttctttggaaatgcctatttcctctgcgatctcctgtaccgtaggctctttcaggtttctttttacataattctctttcgcatatattgctttgtaagcagtgtcacgaagcgaacggctgacgcgtattgaattgttatccctcatataacgcctgatctcaccgatgatcatcggcactgcataggtcgaaaatttgacgtcaagctctgtattaaaattattgatcgccttgatcagtccgatacagcctatctgaaagaggtcgtcaggattctcattgctgccgccgaaacgctttattacactgagcacgagcctcagattccctttgatatactcttccttcgcttcctcgtctcctgcttttatacgcgcaaacaaagcttccttctcctcttctttcaggatgggaagctttgccgtattcacaccacatatttcaacttttccctgagccataataagaatcctccttgctgaacatcacatttttgtcagataaattaagtacaataagatttttctcattatggatttggattatacgaacgttataaaaatataaaaattattggggcttgacaatggatatgagataaattttgctattttaagtttatatattttgtagatgtcacaactcctgttggcggtacaagaccataaggagcagttaccactccatagaaataaactttatatctccttccagatataaggttaccccttctgtttgctacagttacttgcttcgaattattacgagtattgcccatcgaacttacgattttccctgttaaagcctcagaggccgttgcagcaaggtataaagtaggacacgcttgtgatgctgaaagagatgctgaatatgacagctctgcccttctaggagacgatacatcactacttattgctgctgcaaaactaggagtccaccctctcgtttgacttttggtttcaaaagaatcctttccattttcttccaaatcaattaaattcatagaattcaaatattctcgttctttttccgtaaatgaataatatgtttcaggattagtcacttcaataagttctcccaaagtagtatcttctgttattatcatttcactactttcttttgataaattatcagttgctaatacaggaacggatagacaaaccaccaaagataataccgaaataacacttactaattttttcataagttccttcctccttttaactttgaataaatttagtactctagcatagttaccactttattgctttactcagtctaagtaaagtttctgaaaatcactcccccttcatatccatatttccatattattattttatttttgtcctctttttaattcttctcctattaaaatcagccactaaaaataatattatcgtcataataaataggataaatatgctctttgtataatctggccatgcaaccataaacgactcttccgaaccatcaaaatggttttgtacaaaatcatttataatagtatggtaatataatgctcgtactatcagcgccaaaagaattattcctgatatggactctacaaatatacataatctatatagatagcatagtcttctcattgatgtttgcccattttctaataaatgatattcaatttctttccctatttcttcagggctccccatttctcttttaacctcttcaaatgtcatcccttgggcaattctgtcatccatctttttttgtatgtcattgtataacttttttttattttttttactacacttcaaattattaaaaatcatatccaaatactctttttggttcatattataattctccattactttaataagtttatagtatttataacaattctaattttatatctctataattttatttactatacattatatatatccactacaaatatgtcaataatatctattaactttttatattaataattatatttttatatttccaccatattataaaaaatggccataccatttacaaaatatgatactaccgtcttttccttatccccacatgatacatatatatttcacaaacgatttctaaccacatacataacctattccaagttaatccatttaggatcaacccagcatttacgtgtaacattccacctacgatattgaagtcttcccttaaaagttctatacctagtaatgatagaatctgcataaggaataattcccactgtcccgatggcattcctcctcgtctcatatgtatatacgtcagttgctgatgccgcatttatctttatcccaggcatgaaagatataaaccccgcaaccaaaaataatctcaatttcatcttcttcattttctctctcctttcatcacatcatcttctgatattatttcaaaaccatctgcttccagtttctgcgccccttttttacttatcgtctgttctaccccattatcacaaacaaatacataggtaccatcctctttctgtataacaaaagcattatcggttgtaactgcgtaggcactctcctctgtctcaatttcctctattggagtatcaaaataaggctgtaccacaaacatgtacgaacctaataccacaaagaaacttcccacataccatgcaatattaatccaccacctattcttacctggtttagcatcagcgacaattctgaaacgttctatcaaatttgattccaaaggatgtccaatcaccgagaccatctccagaccttctattctaccaaccatctgtttttcctgatgctctccagtcctctccttgaccacacgcacaatggttgataaataattaatcttggtgtctttatccatatcccttataatcgtcaaatcacatttaatttctaataattgttccaaatctttacgtagtaaataaacaacaggattccaccagaaaatacaacaaaatatttgtattagtattttaacagatatatccttattcaaaaaatgagtaacttcatgcataagaatataatatagttcgtcttctgagtaatcccgaagcggaagaagtacttttttattaaaaacaccgattcctaccggagaagcaaccagtggaatatacaaaacttctactttcatctgctttcctacccgatccataacttccagcaatacagattctgcctgtatataatgcgttgcgttcaacttattgatattccttaccgctcttatataccggataaaataccatatgctcagaaagattgtacccgaaagccataacataagtaataaatgcactctcacgaatgttcggcctgctatactcacctgctccaaacacaaaaattcatatatttgattccaaacaaaagcattatcaaatgcttttgtaaaaggaagttctaccggcagcaaaatacgaagtgccgaaaacatatagagaaatagtatactgtaaattccaaatgtttttacaaaactccttttcttcacaaaaatatactgaattatgataataattgaactccatattatagccataaaaaaagaaaatatggtcactctcatagttaattctccaattatgtttctttcaaatctttaataatttcctccaattgggaaatcagttccgccttatcaacatgttccgccttccttgccatcgccactgtcacttgagatattgaatctaccagtcccttggacataatcaggttcgcaccatattcagcttttgtaacagccgcctcaaattgtctcgcatattggtttccatactggcgcataccgttcacttttatcagaccctttttctgcaaagatctcagcatcacatgaagatagtttccattccatgaaacttgttttgtcatttccagtatttcaacacttgtcaagggagttctatgctcccagaatatctccatcaattcttcttcgcttttcgtaagttgtatacctttcataatcatccactctttactgtaattttttttagttattagttaattcagattatattccagcacaaaagtattgtcaatcttatattcttaaatgtgataaccaaataaaaacaaagctttcttcctttctgttcaggtcaaaagctttgtttatttcaattctaatctctgtcccacttctccgccagattctgtatctgcgtctcgaatttggccagctctttattcgcaagcccttcatttttatatacaacctcaagcagccgttttgcggcggcgacgagcctgttgaacgcagcttccgccctgattctggccggtttctccgctgcttttttcggttcccgcacgccgatggtaagcacctctcccgttgcaaggtccacacatccgccggaatacggcgcaagcgcggggcatccgaatgtatcggtgatcgtccgggcaaattcgtccgtcacctggtcatccccatgcacgacaaacacctgtgacggcacggtctcgaagcccttcatccatgccagaaggccgttcatatccgcgtgtccgctgattcctttgagcacttcgatcctcgcgttgacttccacaggctcaccgaacagctttacgctctccgcgccttcaatcagttttctgccgagcgtacccacagcctgatagccgacaaagcagacggtacactctttcctccacagattatgcttcaggtgatggcggatccttccggcctcacacatgccggatgcagataatatcaccttcggccggtcgtcaaagttgatcattctggactcatcactcgtgatcgttgtcttcagtcctctgaacacaagcgggttcacgcctttatttacgagcgcaagcgcatcttcgtcaaaacaggaccagacattcttattgaatacatttgtggcctcaatggcaagggggctgtctacatacacttcaaaatttggatattccggcagcagattccgctctttgatctctcttataaaataaagaagctcctgtgtacggcctacggcgaatgaaggtactacgagattaccgcctttttcaaaggtctctctgagtatcctcgtaaattcgccgacgtaatccggtgtctccacgccgtgcgtccggtttccgtatgtagattctatcacaacataatctgcttcttttattgtctgagggtccttgatgatgggctggttcagattgccgatgtcgccggaaaatacgatctttttctgcacttcgctctctgtgatccatatttctatggccgcagagccgagcagatggccgacatccgtaaaccggacattgatgccttcacataatgctatcctctcgttatagtcacagggggagagcagcttgattgccgcttccgcgtgctccatcttgtacagcggctcgtacggctccgctccgctgcgctttgctttcctgttgcgccattccgcctcaaactcctgtatatgcgcggagtcacgcagcatgatgttgcacaggtcagcagtggcaaacgtcgatatgatatcccctttaaatccctgtttgcagagcattggtatcttgccggaatggtcgatatgcgcatgcgtgagcagaacataatctatgtccgccggggtgaccggtatctcctggttctcatacagatccggtccctgctccataccgcagtcaacgagaatattctttccgcaggcttcaatcaggtgacagcttcccgtaacttcatggtctgctccaataaaagtaagcttcatatacacaacccctttttttcttttattgtatcacctttttgtggacgtggctatgaatactttaccatttcccgccggagcctctgcatgatttttttctccagcctggatatgtatgactgcgatatgccgagcatatccgcaacttctttctgtgtcttttcctccccgtcaggagtgccgagtccgaagcgcatctgtatgatcgtccgctctctccccgacagtctgctgatagccttcagcagcagcttctgttctacttcattttccagatctttatatatggtatcttcttctgttcccagaatatctgagagaagaagttcatttccgtcccaatccacattcagtggttcatcgatagacacttccattttcgtcttattgtttcttctaagatacatgagtatctcattttctatacaccgtgacgcataagttgcaagctttatattcttctcagggttaaacgtattaattgcttttattaatccaatcgtaccgatagaaattaagtcctccacgccgacgcctgtattgtcgaatttctttgctatgtagactaccaggcgcagattgtgctcgataagcacttttttagccttttcatcgtattcggaaccaaggtcattgataacggcactttcttcttcggcctcaagcggcgcgggaagtatctcagaacccccaatatagtgaatgtcttttttatccggaaaaagcagtgtccgaaagtctggaattacttttagtttaaattgatgcggtactgctactttgataaccataatctgttcctcctataatatatcaggatttaatatcatcctgtatgctccatccgatgccacctgtccctcacagataccgataaggggtctgtcgatccacttttcgctcttctggcacacgcacatcttatccagcgtaatgactggcataactcctgcctcttttccgacggaatggtacggaatataccggatcccctccggcagtccggcatcggtcagtgtcttaacaacactttcatccacaatgctgaccggcttgcctgtcactgcatctttcaggctgttgcccgtgtcgatcacggcttccactctcaggactttctcatccttatagagaactgcttcacacctgtactctctcagtcttgacagataagacagaaagttccagactccgagcactgcaaaataacttacgaccgcaagggcgaaaaaaaggctgccgaccttcatatactgccgcagatattcaaatactccgccgacgaggattccgctgatatagagcacgacataagctttcacaaatgtcctgtcccagctgattttcagtcctgccttaagcattacaatattgacaagaccgtggaacagtatgaattttataaacgcatacggtatggggatcatcacgacggcacaggtcaacagcgctccggcagccgcacccaggcagactcttccatgcgtggcagaacatctcagtattctgcgggtgatctgcaggagtatgaagtccatcatgaaattcaccagaaaaaatacgtctatgtataactcataatacacattccacctctttctcttttgatactaaatcgatttggtactcaagcaagatttattatacgagtacggctaaaaagattttgtcagatgatggaattgattccttttttctttcgacagctgttccaaaccacaagatatagatttttcaggactgtttttttgggatttgtgttttgacaaaacactatacattgtgtctattttttgcgtaaaagcgtgaattttatggatgaaaaatggagattgaaagcgaatatagataagaattgtgatatattgtcgaacgaaggcaagaacagagtttcttttgtaacaaaaagaggaacttcacatgtgaagttccccataatttcatactatttgtcttactgcctaccgcttaaagaaatccggtatcttgatggactgttccttaaccttactcgtcggagttctcggtgtatcaagagaaggagttgtccctcctgccggctttctcggcgccgttgtcgtgccgccgcctcttgtaggagccatgccaagatccagcttctgggatgacggcttctgcgcgcctgacgctgcagcaggccgctcatatgcctgcgccccctgctgaggtaccgctcccggcctctgattctccagccttgctttcagctttgaagcgctgccgcctacgttatgtagacctgtggcgatcactgtgatcgtcgcttcatctgctctggaatcatcatacatagcaccaaagataatatttgcatcttccccggccagatcctgaacatattctgccgcgtcagaagcatccataagtgtaatgtcaccggatacattgatgataacgtgggacgcgcccgcgatcgttgtctcgagcagcggactcgcaaccgcctgcttaacagcctcgagcgctttgtcgtcgccgcggccttgtccgataccgatatgcgcgatccccttgtccgtcattactgtctgtacgtcggcaaagtcaagattgataagtgaaggtacgttaatgaggtctgtgataccctgaataccctgctgcagaacttcatccgcctttttgagcgcctccggcatggttgtgcgtctgtccacaacctccagcagcttgtcatttggaatgacgatcaatgtatcaacactttcttttaacttctcaataccggagagggcattgttcatacgcgtctttgactcaaagcggaacggctttgtgacaacaccgaccgtcagcgctccctgctccttcgctatacgcgctacaacaggcgtggcgcctgttccggtaccgcctcccatgccgcacgtcacaaataccatgtcagcacctttcagcgctgcagatatctcttccgaactctcttctgccgctttctcaccaacttccggttttgcccccgcgccgagacctttcgtgatcttgtccccgatctgcatgagcgtaggtgccttacataactggagtgcctgtttatctgtattaatagcaataaattcaacaccggcaatctgttcgtcaatcattcggtttaccgcgttattaccgcctccgccgactccaacaacaataatctttgccgctgcttctgattcattcgtcttaatttctagcaagggtttttcctcctttatcctatccttattatatattatacatcccacagagcaaaacacaaaaacgcactttgctatatatagtatataatataagcttttgtataaaatatcaatagaattttatcttaatttattgatttttacgcatttttcttaattttcttcctgaatttcttctgcgttgaacgtaattgtagtatttccttccgaatagttttccagatggagtgttccttctttcccctcaagtttctcgaggatcggcggaatctgggctatctgttccgaagagacactgtttccgagtgaaattcttatcgtacctttgtacagatatattctgtcatctttacatacgatcttatccggagcaatcttgtattttttcacctgctgcgacgtaacgagcatctcttcaaagatacttttatctttactttctatcgttccgtacagactgatgtcaccggtctcgatcccttcgatgcacggaaggccttcgataaagtccgcgcctttatatacgatcattccttctttatcaaaatatgcgtattcgtttcccgcataaatataacctacgatcggtttttctttcactttgaccttcacgatccacggtgtcttcatgctcactttcatgctgtcgagacacggaagctgcccgccgcggccaagtgcatattttccgagtatgtacagtgagtttatggagaacctgtcattttgtaccgtatttatgatctccttatccttacagtattcattcccctctacctctatcttttgtacatagaaaagaatcagaacggcaagcgccattatggcgatacccatgacgagaaccataaacgcgtagaccttgtggctctttttcttcttctttttcggtctcgccgcctcttcctcctgatactcatttcttcccattgtatactcctcctaagctttctccttaccctctctcattctatcagagaagacacactgagcacaagccccatttccagcagcagaaacacaaccgacgtgcccccgtagctgataaacggcagtgtgatccccgtattcgggatggtattcgtaacaaccgctatgttcaggatgacctgtatcatcatgtgccccatggcgccggcagcgatcagcgctccgaacagatcttttgcgtgggttgcaatgacaaaaaaacgccagatcaggatgaggaacaagatcaggatgaatcctgccccaaacaacccgagctcttcacacacaatagaaaatatcatgtcattttgagcctccggcacaaatccgagcttctgtacactctctccgaggcctctgccgaacagtcctcctgaaccgatggcgtacagtccctgcagcgtctgatatcctttctcaaaggcctccggattccgccagatcgcaagccgctcaagacgataactctcaagcgccagaaaaatggtcataaagccgactcccagcgcgcccatcagtatgaactggctgtatttggggcttgccacaaatacgagaataacgccgatcccgagaatgatgatagccgtacttaagttgctcgcgcccacgaggccgacgatcggcagtatgaggaccataacttttatcatcgttctcatcttgcccatacttttgacattctttgtaatgatgtgcgcaaggaacaatatgaccgccactttggcaaattccgacggctgaaaagaaaaaggccccaaagataaccatcttttggacccgttatactcatcaccgacaaagattaccgcgactgacaaaagaagtgccgtaaaatatccgagcacagccacatgtttccacacatgatagtccatattggcgacaaagaacattccggcaactccaagcactgtggcgaacgcctgctttttcagataataaaacgaatcatgaaatttcacatctccgttatatgcactggtactgtataatatcaccaggccgataagaacgagcagcagcaaggctgccagcatcgtgtaatcatattttttctttttggaccgtgtcaagcaatatgcactccttataaggaatttacaatttctttaaacttatctccacgtgtctcatagttcgggaacatatcccagcttgcgcaggccggcgacagaagcaccgcttctccggggccggcgatctctgccgacataagcaccgcctcctcaaatgtatctgcaaacacataatcatgaaagccgcagctttctgcatcttttgctatcttttcctttgtggcgccaagaaggatcagttttctgacctttccgtcaaagctttctatccattcggtgtaggaggaatccttgtcatatcctccgccgataagcaccgttttgcggttcattgcctggatccccttgatcgcggcatccgggttcgtccctttcgagtcattgtaataaacgactccgtttttctcagtcacaaattcgatcctgtgctccacaccattgaacgccttgacgctctcacggattttgtccaccgggacgccgtacacggctgccatggcagctgccgccatgatattttcatggttgtgcgtgccggggagctgaagttcatccacatggcagatgcatatttcctcaggatttctgtaaatgatcctgccgtcatccagatagatgcctctttctagtttacgccggctgctgaaatatagaacctgtgccctcacattctttccgaattctcttgtcacttcatcttcataatttaaaatacaccagtcttcttctgtctgatttctggcaatatttttcttcgcctcaatgtaagcctccatcgtgtggtggcggttcagatggtccggggttatgttgagcagggcgctgacggccggccggaagcttacgatgctctccagctgaaagctgctcatctcggccaccgcgacggcatgctccgacatctgccctgcggcaacggtatacggattgccgatgttgcccacgacatacacttcttccttataattcttcatgatctccccgagcagggatgtggtcgtcgtcttgccgtttgttccggtgacggccagcacgtcgccttttccgaacgcatacgcaagctcaacctcaccgatgacttctatcccccgctcaaacatctgccggacgatgggcagatccgtcggcacacccgggctcagtacgacaaggtccagtgtctggagcagctcttccgggaacgttccgagtacgatctgcacagcgccgccgatacggccggccagttccgctttatcgagattctcatttccgtcatacagcactacgtccgcaccgtgttctgtcaaaagtcccacagcgcctgttccgctcaatccggaaccgaatacgagcaccttcttatttgtaacttccataatttcctcctacatagccatcagcgcaacgagacagagaagcgccgtaataatcgaaaatactgccacaactttcgtttccgaccatccgcacagttcaaaatgatgatggatcggcgccatcttaaaaatgcgctttccgccggtcttcttaaaataagtaacctgtatcataacggacagtatctccgccatgtatataaatgcgacgatgatcagaaagatcggcatctggagcatataggcggtggacgccacaaatcctcccagggccagtgagcctgtatcccccatgaacacgctggccggatagacgttaaagagcaggaaaccgagcagcgcgcccacgacagcgcatgtgatcggttctatgccgctcttcgtcccgatagctaccacggtaaagaatgtggcgatcagaactgttacactcgatgcaagaccgtccagaccgtccgtaaagttggccccgttgacggtaccgagcacggccacaaacatgagcggtatcgcaagccagccgatgtcaaggtaatgtccgcctgagaaaggtataagcatcgtcagcggtatattcgtaaaacgcacgaggtaaaacgccagcacagctgtcaccagtatctgcagcgcgaatttctgcttcgggtacaggccgtcggaacgcttcatcacaactttcagataatcatccagaaaaccgataaggccaaaaccaagggtaacgaacaatatcggtatgatcttcggatagttcttcagataaaacactgaagtgaccacaacgctcaccagtatgatgactccgcccatcgtcggcgtgcccgccttcttcaggtgagacttcacaccgtcttccctctctgtctgccccatcttaagtcttcttaaaatcggaataatcaccggccccataactacactaagtgcaaatgcaatcaataccggaagaaaaactctataatccataatccacctcttcgcttcttttgttgttctctaaccttacatagtatacttcattttctactctttttcaatgccaagatagggcaatatattctcaaaaacgtcccgtattaccggcgccgcgatcgtaccgccgtaataaacaccctgaggattgtatatgacacacatcccgagcacctgcggatcgtccgccggcgcgaacccgataaaagacgagatatatttgttagcgcttctcggcagtgtctgggacgtagctgtttttcccccgatgtgatatccttccacataggcattctttcccgacccttcggagactacgctttccagcagcatctgcatcgtctctgacgtctcttttgatacgatattcttttcctttttgtacttgaacgtctccacttcttttccttttgagtccagcactttgacgccgaagtggggcgtgactctcgttcctccgttgacaagcgaactgaccgtagtcgccatctgcatcggtgtgatctggaacgactgtccgaacgccatggtagcaagctctaccattcctacgttgctcttcttatgcatgatcgttccggcttctcccggcagatccacccctgtcattcccataagtccgaactggttaaaatactcataaaacttatctacaccgagtctcagtccgatatcgataaataccgggttgcaggaattctgtatgccctgcacgaaagtctctgaaccgtggcctcccactttgtggcaccgtatttttctgtcttccaccacccggtagccgggacagctgaaattgtcgttcagcgatacgacaccttcctccaggcaggcggaggctgtaatgatcttgaaggtggatcccggctcatatgtgtcgttgatacagccgttgcgccacatctgattcagcgcatcctgtttttcttccgcggacattgcatccgtatcttcttttgtattgagcgtaaacgggtcgttcaggttgaactccggtacatttaccatggcgatgatctcgccgttttgcggattcatgagaaggatcgacactttgtccgcctgcttttcttccatgactttttctgccatctgctgggcatacatctgtatattataatccagactcacctgcagtgtgttccccggcacaggttccatccgatcctccgccacgccttccagctccacgcctctggcatctgtcgtcgtaagtatctttccgttgattcctttcagatattcctcatattttacttcaagcccgatgattccctgattatcccctcctgtaaatccaagcaccttggacgccagctcattgtatggataataacgtttaaaatcttcgtctactttcacgccgtccagctccagttcccggatacggtctcctgtcgccttctctacatttgtcttgatacgctccatagatgagactttctctaccttcttgcgcaccgtatcctcgtccatatcgagctctgcacaaagggccgctatcactccttccggatccttcagctggctgtgcacgaccgagatcgtacatacggtcttgtttgtcgcaaggaccgttccgccggcatcgacgatttctcctctggccgccttgatatcccgctcgcgctcgtgaagtgattcggctttctcctgatagtattcggcatcaaacaccatgagatatacaagtcttcccacaagtcccagtatgatgaccgacgcacagatgaatactacaaatatcttctttttattataggtcttattcttcacaaaaaaacctcacagaagccgtttttataacttattaacacttctgtgaggttattctacatattttattctattctgcttctgccgccgcctttgtgacgccgagatacgggaatatttcagccattattttggacgccatctccgtcgcgtaggagctgcttgcctgcgacgcaacgttcggttcgtccacaacgacatatacaacgacttccggattatcctgaggcgcgtatccgataaaagatacgagatattttccgttgcctcggggctgcttctccgccgttcctgtcttaccgcctatgtcatagccctcaacggccgccgagcttccggtgccttcctgcacaactccgagcatatagtctttgatcagctcgctcgtctcttttgatacggtgcgttttacgagtaccgggtctttattctctgtgacattgccgttttcatcctgtatctgttttactacgtgaggcttatagtagtctccgccgttgatcagtgaagagaacgcggataccatctgtgtcatggtcacattgaagttctgcccgaacgcatttgtcgccagactggccgggtccatattttcaggctcatacaacagtccggtctcctcgcccggaaggtctatgcctgtggacgtcccgaaaccgaagagttcctggtatttgcagaattcttcatttcccagcgcggcgcctatctgcatgagcgccacgttacacgaattctcaagtgactgtttcagcgtctgtgtgccgtgtccgtcacggttgctgcagtgaatgtcatggtctcccacatggagcataccgccgcacgtataactttcatttcccgtaaggattcctgtctcgagaccggcagatattgtgaacggcttaaaagtagaaccgggttcatacgtgtcgcttacgcagaagttattccacagagcgttcagcttgtccagtttctcttcatctgtcatggcgtctatggactcttccgagtaatagtttgtcaggtcccgcgggctgttcagatcaaaattcggataagacgcctctgcgatgatctctccattctgcggattcatgacaatgaccgccgtgtttttgcttccctctccctctgatgcctcatttttatgcttttcgttaaactcaaggatatgcttttccactatgctctgcacctgcaggtcaatggtcgatacgaccgtgcttccgtcttccgcctcttttaccgtgcgctctacgcttgcttcatcgtcaaaatatccgtattccctgccgtcagtgccattcagtatggaattgtacgaagcctcgattccattgcttcccacattgccgtcaacggtgaatccgaccacatcgcttgcaagtgttttgtacggatattttctgacataatcttcttccagccatatgccttttacgtccggatatttcttttcatccgtatctatcttttcaaactcttttgctttctcataatcgattccttttttcagaatgttgtaccggctccccggattgtcttttatcagttttctgacgtcttcctcctcgattccgaagcagtctttgagcacttcaattgtcggttccacatagtcatctttgctcgtcaccacttttacgtccagaatgacattgtacacacgctcactcgtagcaatctttgttccgttccggtctacgatatctccccgcctgaacgggatcgtccggctgtcgtactgctgctggtccagcactaccttcgtgtacctgtcgccgctggccgcattaatatatgtaattctccccactaatacaccaaaagctagtacaattgccacgaagagcattactagctttttctgcatcagtttggaaaacttccttttaaatacatttcttgtctgttttcccataattccacctgtttattattttttgtctgattgagcaagtataccgtcttccggtatattctcatactgtttcacataatctgacgccgggttgtcgtattccacgatctgatccgaggatgcgtataccatcccaagctcattctgggccttgtcccgtatttcgtcaagattgacagaatccattacagcattatactttgtattattttcttctttcatgtccgccagctcttcctgcatcgcagtgatcgccttggagcggctcgtaagtctggactgtatctgaacataatttacacatactatgagtgcaagtatggccgccacagccagaaagataacgtatccggggctcatgtgcagcgccttcctgcggttcttgcgcacctgcctgcttgtctttccagttctctcaggttcttttgtacgccgttccggctcatacgccggttttgtcaccacattgccgtagacatacatctgactgcgtgttctgtttgatgtgccatatgattttctgcttcttgatgatgtatatcctgctgccatgtctttcccctttcttactttatcgtcgttcaaatatgcggagctttgcgctcttcgcacggctgttatattccaattcctcctcacctggaagaatcggttttctagttaaaatactcccctttgattcttttccgcatacacatacgggaaaatcgctcggacaggtgcacggattttcatttttcttaaacgcgctttttactatcctgtcttcaagtgaatggaaggttataatacacagcctcccacccggttttaatagatcgatcatctcatccagtgaatcccgcagaacttccagctccctgttcagttcaatgcggatagcctggaacgtccttttggaaggatgcccagactttttctggtatttcatcggtatagcctgtctgatgatctccgtcagctggccggtcgtttcaatggacctctccctgcgtgcggctgcaatatgtttggcaatatttttggcaaacttatcttccccgtagtcgcgtatcacacggtagaggtccatctcactgtagtcattgacgatgtccctggctgtcattttctgacgcgtatccatcctcatgtccagcggcgcatcttcgcgataggagaatccccgctctgccgtatcaagctgataagatgatacgcccagatcgagcacgatcccgtcgactctgtcaatgcctagcttgtggagctgcgacttcatatcacaatagttgctcctgactatcgtgaccttctccccgaagtcttttaagcgggcgcctgcggccgttatcgccgccgcgtcctggtctattcctacaatactccccttgtttcctaagtgtctgcatatctcgtatgcatgtccacctccaccaagcgttccgtccacatatgtgccgtccggcctgatgttcaaaccattgatcgtttcatcaagtaatactgacttgtgttcgaatcccatatcttctccctctagatactgaatccgctctcttccatatcagatgcaatatcctcaatgttgagctccacttcagcattcttttcatcccatcttgccttgtcccaaatctcggcacgcttccccatgccgataaacacgacctctttctcaagatgcgcgtaggtcctcagtacagaagggatcaaagttctgccttgcttgtcaaggtcgccgtcggttgcacttccctgaaagaagtaagcaaaagctctggcttttttgtccgtggttgttggcaaagcgttaagtttgtcttcaaaggcgttccattcatcttcaggatatacatataagcagttttccataccttttgttatgacgaaattctcccctagatcgtcacgaaacttggccggaatgatcaatctgcccttagggtcaatattatgactgtattctcctttcaacattagaactcaccctctttcaagcggtctgccactttcgtaccactttataccacttttcaccactttctaccacttgagtacattgtaaaccactttatgggtgatttcaaccccttttttagaaaaatttgaaaggggtcagaccccttccgaaatttggactgttgtcagacttctttttttgtttttctatcacgcacaaaaataaggcaccacagcacagaccggtatatcgtctatgctgcagtgccttgtatttacggcttttacaggctattcttctgtggtccctgccgcctcggacaggttattggaaaattctgtcagagcggtgtaatcaatctccaccgactctttcggtttatttgacttatatgtcccgtaggcagaatacccaacccagcctacaagaagaagtgcggccagtcccacgacacatttgcgggcagcgttcgcggccttctcttttttcatgatctttttgcggttagctttttcctgtttatatctgtctactttttcctgactcatactttttcgctccttctatagctccataactaaaagctattttaccatagtttccggcattatacaactacaattacgccgccgtcggaagcatacatactgcttattccggctgtatctacgatgatgacatcccgaaaatctgctttttcaaggatcatctccttcacctggcgggcgcgttccggacagttgcagtgtgagatggccagtattttccggcccggttctttcagtcttctggcaatctcatctaccattttcaccagcgccttctttatacccctcgcctgaccaagctggcagatcgtaccttccgctgtggctcccatcacaggcttgatgttgagcgccgttgcaactattgccttcagccctgtaagacgcccgtttttccgcagtgtctcaagtgtttcaagcacaaaatacgtatcctgctccgcgatatattcttctactgtatctattacatcctgaaaggacattcctttttcctcgcactctgctatcttcagcgctatcaacgtctctccgacagatgcggaacgggaattaaacacataaatatctttctcgccatattcttcacagtaaaggttcttgccgagcagggcgctgttatatgaaccgctcagttctgaagaaagtgtcactgcatacacatgatccgcatcacagtggaatccttccatatatcgctccggtgacggacaggaagatttgggacactccggcgaagcagccaccagcttcagaaattctctctggtcaaatgtctcatcatccacaatctgctgccctgctacttctat
